(19) United States
(12) Patent Application Publication
(10) Pub. No.: US 2006/0241015 A1
(43) Pub. Date: Oct. 26, 2006

(54) Cancer genes

(76) Inventors: Zairen Sun, Rockville, MD (US); Xuan Li, Silver Spring, MD (US); Gilbert Jay, North Bethesda, MD (US); Karl Kovacs, Rockville, MD (US); Wufang Fan, San Diego, CA (US); Youmin Shu, Potomac, MD (US)

Correspondence Address: MILLEN, WHITE, ZELANO & BRANIGAN, P.C., 2200 CLARENDON BLVD., SUITE 1400, ARLINGTON, VA, 22201, US

(21) Appl. No.: 10/502,394

(22) PCT Filed: Jan. 24, 2003
(86) PCT No.: PCT/US03/01943

§ 371 Date: Oct. 19, 2005

Related U.S. Application Data
(60) Provisional application No. 60/356,130, filed on Feb. 14, 2002.

(30) Foreign Application Priority Data
Jan. 25, 2002 (US) 10/054935
Mar. 22, 2002 (US) 10/102946
Apr. 8, 2002 (US) 10/117229
May 14, 2002 (US) 10/144198
Jul. 19, 2002 (US) 10/197824

(51) Int. Cl. A61K 38/17; G06Q 10/00; C12Q 1/68; G01N 33/574; C07H 21/04; C12P 21/06; C07K 14/82

(52) U.S. Cl. 514/2; 530/350; 435/69.1; 435/320.1; 435/325; 435/6; 435/7.23; 536/23.5; 705/2

(57) ABSTRACT

The present invention relates to all facets of novel polynucleotides, the polypeptides they encode, antibodies and specific binding partners thereto, and their applications to research, diagnosis, drug discovery, therapy, clinical medicine, forensic science and medicine, etc. The polynucleotides are differentially expressed in prostate and breast cancers and are therefore useful in variety of ways, including, but not limited to, as molecular markers, as drug targets, and for detecting, diagnosing, staging, monitoring, prognosticating, preventing or treating, determining predisposition to, etc., cancers.

[0001] This application claims the benefit of U.S. application Ser. No. 10/054,935, filed Jan. 25, 2002; 60/356,130, filed Feb. 14, 2002; Ser. No. 10/102,946, filed Mar. 22, 2002; Ser. No. 10/117,229, filed Apr. 8, 2002; U.S. Ser. No. 10/144,198, May, 14, 2002; Ser. No. 10/197,824, Jul. 19, 2002, which are hereby incorporated by reference in their entirety.

### DESCRIPTION OF THE DRAWINGS

[0002] FIGS. 1-18 show amino acid sequence alignments between polypeptides of the present invention, and polypeptides listed in public databases. SEQ ID NOS for the polypeptides of the present invention are listed in Tables 3 and 4. Others are as follows: KIAA0803 (SEQ ID NO 31); KIAA0408 (SEQ ID NO 32); NM_{—}030817 (SEQ ID NO 33); NM_{—}015384 (SEQ ID NO 34); NM_{—}133433 (SEQ ID NO 35); XM_{—}033473 (SEQ ID NO 36); XM_{—}059862 (SEQ ID NO 37); NM_{—}012062 (SEQ ID NO 38); NM_{—}012063 (SEQ ID NO 39); NM_{—}005690 (SEQ ID NO 40); XM_{—}042775 (SEQ ID NO 41); NM_{—}000125 (SEQ ID NO 42); XM_{—}094949 (SEQ ID NO 43); XM_{—}050424 (SEQ ID NO>4; KIAA0534 (SEQ ID NO 76); KIAA1217 (SEQ ID NO 77); KIAA0301 (SEQ ID NO 78); AF441770 (SEQ ID NO 79); XM_{—}085817 (SEQ ID NO 80); AK001276 (SEQ ID NO 81); XM_{—}033473 (SEQ ID NO 82); AK022207 (SEQ ID NO 83).

[0003] FIG. 19 shows differential display patterns for genes of the present invention. The white arrowhead indicates the position of a DNA fragment derived from a differentially regulated gene of the present invention. The experiments were performed in duplicate. Each sample set (4 lanes) contains a duplicate from normal (left) prostate tissue and a duplicate tumor (right) prostate tissue from the same individual. There are several sample sets for each gene.

[0004] FIG. 20 (A-G) shows the amino acid alignments of human kidins2220 variants (XM_{—}045362, SEQ ID NO 90; and AB033076, SEQ ID NO 91) and rat variants (AF239045, SEQ ID NO 94; and AF313464, SEQ ID NO 93). The referenced numbers are GenBank identifiers.

[0005] FIG. 21 shows amino acid alignments between Urb-ctf (—BCU1041,” SEQ ID NO 96), AK014463 (mouse, SEQ ID NO 98) and XM_{—}058887 (human, SEQ ID NO 97). Regions of sequence identity are shaded.

[0006] FIG. 22 is the alignment of the amino acid sequences of human BCU399 (SEQ ID NO 100), human XM_{—}059670 (SEQ ID NO 101), a partial sequence for BCU399, and monkey AB071059 (SEQ ID NO 104).

### DESCRIPTION OF THE INVENTION

[0007] The present invention relates to all facets of genes which are differentially regulated in cancer, polypeptides encoded by them, antibodies and specific binding partners thereto, and their applications to research, diagnosis, drug discovery, therapy, clinical medicine, forensic science and medicine, etc. The polynucleotides and polypeptides are useful in variety of ways, including, but not limited to, as molecular markers, as drug targets, and for detecting, diagnosing, staging, monitoring, prognosticating, preventing or treating, determining predisposition to, etc., diseases and conditions of the breast and prostate, especially cancer. The identification of specific genes, and groups of genes, expressed in pathways physiologically relevant to prostate and breast permits the definition of functional and disease pathways, and the delineation of targets in these pathways which are useful in diagnostic, therapeutic, and clinical applications. The present invention also relates to methods of using the polynucleotides and related products (proteins, antibodies, etc.) in business and computer-related methods, e.g., advertising, displaying, offering, selling, etc., such products for sale, commercial use, licensing, etc.

[0008] No single gene or protein has been identified which is responsible for the etiology of all prostate and breast cancers. For example, although prostate specific antigen (“PSA”) is widely used as a diagnostic reagent, it has limitations in its sensitivity and its ability to detect early cancers. It is estimated that approximately 20% to 30% of tumors will be missed when PSA is used alone. As a result, diagnostic and prognostic markers for cancer will involve the identification and use of many different genes and gene products to reflect its multifactorial origin With this in mind, combinations of the differentially-expressed genes of the present invention can be used as diagnostic and prognostic markers for prostate and breast cancers.

[0009] A continuing goal is to characterize the gene expression patterns of the various cancers to genetically differentiate them, providing important guidance in preventing, diagnosing, and treating cancers. Molecular pictures of cancer, such as the pattern of differentially-regulated genes identified herein, provide an important tool for molecularly dissecting and classifying cancer, identifying drug targets, providing prognosis and therapeutic information, etc. For instance, an array of polynucleotides corresponding to genes differentially regulated in prostate or breast cancer can be used to screen tissue samples for the existence of cancer, to categorize the cancer (e.g., by the particular pattern observed), to grade the cancer (e.g., by the number of up- or down-regulated genes and their amounts of expression), to identify the source of a secondary tumor, to screen for metastatic cells, etc. These arrays can be used in combination with other markers, e.g., PSA, PMSA (prostate membrane specific antigen), or any of the grading systems used in clinical medicine.

[0010] As indicated by these studies, cancer is a highly diverse disease. Although all cancers share certain characteristics, the underlying cause and disease progression can differ significantly from patient to patient. So far, over a dozen distinct genes have been identified which, when mutant, result in a cancer. In breast cancer, alone, a handful of different genes have been isolated which either cause the cancer, or produce a predisposition to it. As a consequence, disease phenotypes for a particular cancer do not look all the same. In addition to the differences in the gene(s) responsible for the cancer, heterogeneity among individuals, e.g., in age, health, sex, and genetic background, can also influence the disease and its progression. Gene penetrance, in particular, can vary widely among population members. Recent studies have shown tremendous diversity in gene expression patterns among cancer patients. For these and other reasons, one gene/polypeptide target alone can be insufficient to diagnose or treat a cancer. Even a gene which is highly differentially-expressed and penetrant in cancer patients may not be so highly expressed in all patients and at all stages of the cancer. By selecting a set of genes and/or the polypeptides they encode, cancer diagnostics and therapeutics can be designed which effectively diagnose and treat a population of diseased individuals, rather than only a small handful when single genes are targeted.

[0011] In accordance with the present invention, genes have been identified which are differentially expressed in prostate cancer. See, e.g., Tables 1-5 and below. These genes can be further divided into groups based on additional characteristics of their expression and the tissues in which they are expressed. For instance, genes can be further subdivided based on the stage and/or grade of the cancer in which they are expressed. Genes can also be grouped based on their penetrance in a cancer, e.g., expressed in all cancer examined, expressed in a certain percentage of cancers examined, etc. Additionally, genes can be categorized by their function and/or the polypeptides they encode. This includes, but is not limited to, cellular localization, functional activity (e.g., kinase, cytoskeletal element, or transcriptional factor), functional pathway (e.g., protein manufacture, cell signaling, cell movement, cell adhesion, responsivity to cAMP, energy production, etc.), etc. These groupings do not restrict or limit the use such genes in therapeutic, diagnostic, prognostic, etc., applications. For instance, a gene which is expressed in only some cancers (e.g., incompletely penetrant) may be useful in therapeutic applications to treat a subset of cancers. Similarly, a co-penetrant gene, or a gene which is expressed in prostate cancer and other normal tissues, maybe useful as a therapeutic or diagnostic, even if its expression pattern is not highly prostate specific. Thus, the uses of the genes or their products are not limited by their patterns of expression.

[0012] In developing reagents for the diagnosis and treatment of a disease, it may be useful to know the cellular localization of a differentially expressed polypeptide to determine how to use it as a target. Proteins which are secreted or on the cell-surface are more readily accessible than intracellular proteins, and can be, e.g., blocked or inhibited to restore levels to normal.

[0013] In recent years, there have been numerous reports on specific targeting of tumor cells with monoclonal antibody-drug conjugates using cell-surface proteins. See, e.g., Chari., Adv. Drug Deliv. Res., 31: 89-104 (1998); Pietersz and Krauer, J. Drug Targeting, 2: 183-215 (1994); Sela et al., in Immunoconjugates, 189-216 (C. Vogel, ed. 1987); Ghose et al., in Targeted Drugs, 1-22 (E. Goldberg, ed. 1983); Diener et al., in Antibody mediated delivery systems, 1-23 (J. Rodwell, ed. 1988); Pietersz et al., in Antibody mediated delivery systems, 25-53 (J. Rodwell, ed. 1988); Bumol et al., in Antibody mediated delivery system, 55-79 (J. Rodwell, ed. 1988). Cytotoxic drugs such as methotrexate, daunorubicin, doxorubicin, vincristine, vinblastine, melphalan, mitomycin C, and chlorambucil have been conjugated to a variety of monoclonal antibodies. Therapeutic agents can be directly conjugated to the antibody, or through cleavable linkers which facilitate the release of the agent in active form only when it is inside the cell. See, e.g., U.S. Pat. No. 6,333,410.

[0014] By the phrase “differential expression,” it is meant that the levels of expression of a gene, as measured by its transcription or translation product, are different depending upon the specific cell-type or tissue (e.g., in an averaging assay that looks at a population of cells). There are no absolute amounts by which the gene expression levels must vary, as long as the differences are measurable.

[0015] The phrase “up-regulated” indicates that an mRNA transcript or other nucleic acid corresponding to a polynucleotide of the present invention is expressed in larger amounts in a cancer as compared to the same transcript expressed in normal cells from which the cancer was derived. The phrase “down-regulated” indicates that an mRNA transcript or other nucleic acid corresponding to a polynucleotide of the present invention is expressed in lower amounts in a cancer as compared to the same transcript expressed in normal cells from which the cancer was derived. In general, differential-regulation can be assessed by any suitable method, including any of the nucleic acid detection and hybridization methods mentioned below, as well as polypeptide-based methods. Up-regulation also includes going from substantially no expression in a normal tissue, from detectable expression in a normal tissue, from significant expression in a normal tissue, to higher levels in the cancer. Down-regulation also includes going from substantially no expression in a normal tissue, from detectable expression in a normal tissue, from significant expression in a normal tissue, to higher levels in the cancer.

[0016] Differential regulation can be determined by any suitable method, e.g., by comparing its abundance per gram of RNA (e.g., total RNA, polyadenylated mRNA, etc.) extracted from a prostate tissue in comparison to the corresponding normal tissue. The normal tissue can be from the same or different individual or source. For convenience, it can be supplied as a separate component or in a kit in combination with probes and other reagents for detecting genes. The quantity by which a nucleic acid is differentially-regulated can be any value, e.g., about 10% more or less of normal expression, about 50% more or less of normal expression, 2-fold more or less, 5-fold more or less, 10-fold more or less, etc.

[0017] The amount of transcript can also be compared to a different gene in the same sample, especially a gene whose abundance is known and substantially no different in its expression between normal and cancer cells (e.g., a “control” gene). If represented as a ratio, with the quantity of differentially-regulated gene transcript in the numerator and the control gene transcript in the denominator, the ratio would be larger, e.g., in prostate cancer than in a sample from normal prostate tissue.

[0018] Differential-regulation can arise through a number of different mechanisms. The present invention is not bound by any specific way through which it occurs. Differential-regulation of a polynucleotide can occur, e.g., by modulating (1) transcriptional rate of the gene (e.g., increasing its rate, inducing or stimulating its transcription from a basal, low-level rate, etc.), (2) the post-transcriptional processing of RNA transcripts, (3) the trasport of RNA from the nucleus into the cytoplasm, (4) RNA nuclear and cytoplasmic turnover, and polypeptide turnover (e.g., by virtue of having higher stability or resistance to degradation), and combinations thereof See, e.g., Tollervey and Caceras, Cell, 103:703-709, 2000.

[0019] A differentially-regulated polynucleotide is useful in a variety of different applications as described in greater details below. Because it is more abundant in cancer, it and its expression products can be used in a diagnostic test to assay for the presence of cancer, e.g., in tissue sections, in a biopsy sample, in total RNA, in lymph, in blood, etc. Differentially-regulated polynucleotides and polypeptides can be used individually, or in groups, to assess the cancer, e.g., to determine the specific type of cancer, its stage of development, the nature of the genetic defect, etc., or to assess the efficacy of a treatment modality. How to use polynucleotides in diagnostic and prognostic assays is discussed below. In addition, the polynucleotides and the polypeptides they encode, can serve as a target for therapy or drug discovery. A polypeptide, coded for by a differentially-regulated polynucleotide, which is displayed on the cefl-surface, can be a target for immunotherapy to destroy, inhibit, etc., the diseased tissue. Differentially-regulated transcripts can-also be used in drug discovery schemes to identify pharmacological agents which modulate, suppress, inhibit, activate, increase, etc., their differential-regulation, thereby preventing the phenotype associated with their expression. Thus, a differentially-regulated polynucleotide and its expression products of the present invention have significant applications in diagnostic, therapeutic, prognostic, drug development, and related areas.

[0020] The expression patterns of the selectively expressed genes disclosed herein can be described as a “fingerprint” in that they are a distinctive pattern displayed by a tissue. Just as with a fingerprint, an expression pattern can be used as a unique identifier to characterize the status of a tissue sample. The list of expressed sequences disclosed herein provides an example of such a tissue expression profile. It can be used as a point of reference to compare and characterize samples. Tissue fingerprints can be used in many ways, e.g., to classify a tissue as prostate cancer, to determine the origin of a metastatic cells, to assess the physiological status of a tissue, to determine the effect of a particular treatment regime on a tissue, and to evaluate the toxicity of a compound on a tissue of interest, to determine the presence of a cancer in a biopsy sample, to assess the efficacy of a cancer therapy in a human patient or a non-human animal model, to detect circulating cancer cells in blood or a lymph node biopsy, etc. While the expression profile of the complete gene set represented in the present invention may be most informative, a fingerprint containing expression information from less than the full collection can be useful, as well. In the same way that an incomplete fingerprint may contain enough of the pattern of whorls, arches, loops, and ridges, to identify the individual, a cell expression fingerprint containing less than the full complement may be adequate to provide useful and unique identifying and other information about the sample. Moreover, cancer is a multifactorial disease, involving genetic aberrations in more than gene locus. This multifaceted nature may be reflected in different cell expression profiles associated with prostate cancers arising in different individuals, in different locations in the same individual, or even within the same cancer locus. As a result, a complete match with a particular cell expression profile, as shown herein, is not necessary to classify a cancer as being of the same type or stage. Similarity to one cell expression profile, e.g., as compared to another, can be adequate to classify cancer types, grades, and stages.

[0021] For example, the tissue-selective genes disclosed herein represent the configuration of genes expressed by a cancer tissue. To determine the effect of a toxin on a tissue, a sample of tissue is obtained prior to toxin exposure (“control”) and then at one or more time points after toxin exposure (“experimental”). An array of tissue-selective probes can be used to assess the expression patterns for both the control and experimental samples. Methods of making and using arrays are described below.

Urb-ctf (BCU1041FB)

[0022] Urb-ctf (“Up-Regulated Breast Cancer Transcription Factor” or BCU1041FB or FB2847A11) codes for a transcription regulatory factor having 614 amino acids which is up-regulated in breast cancer. The nucleotide and amino acid sequences of Urb-ctf are shown in SEQ ID NOS 95 and 96. It contains a bZIP domain at about amino acid positions 228-275, conferring DNA-binding activity. It also has a leucine zipper providing a dimerization activity. There are a number of UniGene clusters that map close to the gene, including, e.g., Hs.350229, Hs.272458, Hs.350229, Hs.255286, Hs.184779, and Hs.276916. Predictions using GenomeScan (e.g., Yeh et al., Genome Res. 11: 803-816, 2001) revealed at least two different predicted genes, Hs17_{—}11001_{—}27_{—}4_{—}1 and Hs17_{—}11001_{—}27_{—}5_{—}2, instead of the single gene, Urb-ctf, described herein. A partial human cDNA (AL049450; XM_{—}058887; SEQ ID NO 97) for Urb-ctf was previously identified, but this coded for only 198 amino acids and contained only a part of the bZIP domain, as well as missing significant portions of the N- and C-termini. A mouse homolog, AK_{—}014463 (SEQ ID NO 98), has been cloned.

[0023] All or part of Urb-ctf is located in genomic DNA represented by GenBank ID: AC068669, BAC-ID: RP11-749116, and Contig ID: NT_{—}010844. The present invention relates to any isolated introns and exons that are present in the gene. Intron and exon boundaries can be routinely determined, e.g., using the polypeptide and genomic sequences disclosed herein. Using UniSTS probes, Urb-ctf can be chromosomally mapped at its 5′ end with UniSTS: 155813 to 40.144 Mb, and its 3′ end with UniSTS: 619 to 40.084 Mb. Strikingly, the Urb-ctf overlaps with the thyroid hormone receptor alpha 2 gene (CAB57886).

[0024] As indicated by the presence of a bZIP domain, Urb-ctf has transcriptional regulatory activity, DNA-binding activity, and dimerization activity. These activities can be determined routinely. For example, DNA-binding activity can be determined using gel-shift assays, e.g., as carried out in, e.g., U.S. Pat. No. 6,333,407 and 5,789,538. Transcriptional activity can be determined using conventional transcriptional assays, including in vivo and in vitro assays, such as those described in F. M. Ausubel et al., Eds., CURRENT PROTOCOLS IN MOLECULAR BIOLOGY (John Wiley & Sons, New York, 1994); de Wet et al., Mol. Cell Biol. 7:725 (1987); U.S. Pat 6,306,649; U.S. Pat. No. 6,214,588; Liao, S. M. et al., Genes. Dev. 5:2431-2440 (1991); Nonet, M., et al., Cell 50:909-915 (1987). The phrase “transcriptional regulatory activity” indicates that the polypeptide modulates transcription in analogy to the activity of other bZIP proteins, e.g., by binding to DNA and interacting with other proteins of the transcription apparatus. For example, both c-Jun and c-Fos are bZIP proteins that form a dimer known as the transcriptional activator AP-1, a transcriptional activator. See, e.g., Genes VII, Lewin, Pages 649-665, 2000. Dimerization activity, i.e., the ability to form hetero- or homodimers with other proteins (in analogy to the c-fos and c-jun system), can be measured routinely, e.g., using the yeast two-hybrid system.

[0025] Nucleic acids of the present invention map to chromosomal band 17q21.1. There are a number of different disorders which have been mapped to, or in close proximity to, this chromosome location. These include, e.g., Dementia, frontotemporal, with parkinsonism; Neuroblastoma; Osteoporosis, idiopathic; Ehlers-Danlos syndrome, types I and VIIA; Osteogenesis imperfecta; Glanzmann thrombasthenia, type B; Renal cell carcinoma, papillary; Thrombocytopenia, neonatal alloimmune; Trichodontoosseous syndrome; Hypertension; Epidermolytic hyperkeratosis; Hemolytic anemia due to band 3 defect; Spherocytosis, hereditary; Gliosis, familial progressive subcortical; Renal tubular acidosis, distal; Patella aplasia or hypoplasia; and Pseudohypoaldosteronism type II. Nucleic acids of the present invention can be used as linkage markers, diagnostic targets, therapeutic targets, for any of the mentioned disorders, as well as any disorders or genes mapping in proximity to it.

[0026] In addition to its expression in breast cancer, Urb-ctf can be detected in most tissues examined, but either none, or at very low levels, in normal breast tissue. Multiple forms of it can be detected in the brain, muscle, testes, and thymus. As these results indicate, Urb-ctf has a normal functional role in most tissues, and can consequently be involved with diseases associated with them, as well. For instance, Urb-ctf can be involved in renal cell carcinoma and familial gliosis disease. As discussed earlier, no single gene is responsible for all breast cancers. Thus, the fact that Urb-ctf is up-regulated in the breast cancers examined herein does necessarily mean that it will be up-regulated in all human breast cancers.

BCU399

[0027] Human BCU399 codes for a polypeptide of 487 amino acids, which is upregulated in breast cancer, in both early stage ductile carcinoma and in late stage invasive carcinoma The nucleotide and amino acid sequences of human BCU399 are shown in SEQ ID NOS 99 and 100. It contains seven transmembrane domains at about amino acids 106-128, 135-157, 172-194, 231-253, 268-285, 367-389 and 458480 of SEQ ID NO 100, a signature of the G protein-coupled receptor family. It contains a nucleotide-binding site motif (P-loop) at about amino acids 53-60, indicating that it is a purinergic receptor liganded by nucleotides, including ATP, ADP, GTP, GDP, UTP, and/or UDP. It contains a G-protein binding motif at about amino acids 63-75. It contains N-glycosylation motifs at about amino acids 34-37, 135-138, 203-206 and 397400. It contains phosphorylation motifs, important for regulatory functions, including PKC phosphorylation motifs at about amino acids 36-38, 227-229, 262-264, 313-315, and 445-447 of SEQ ID NO 100; CK2 phosphorylation motifs at about amino acids 44-47, 60-63, 89-92,91-94, and 356-359; and a tyrosine kinase phosphorylation motif at about amino acids 59-66. The human BCU399 contains 12 exons. The present invention relates to any isolated introns and exons that are present in the gene. Intron and exon boundaries can be routinely determined, e.g., using the sequences disclosed herein.

[0028] A partial sequence for human BCU399 was previously identified (Accession Number XM_{—}059670), but this sequence (SEQ ID 101) was incomplete, coding for only 153 amino acids (See FIG. 22, “Human”). Its homolog was identified in monkey (Accession Number AB071059), but this sequence was also incomplete, coding for only 360 amino acids (See FIG. 22, “Monkey”). Monkey BCU399 (SEQ ID NO 102) lacks the first 127 amino acids of human BCU399 (SEQ ID NO 100) but shares about 99% amino acid sequence identity to human BCU399 along its entire length of 360 amino acids, with three amino acids different from human BCU399 at about positions 187,238, and 412 (See FIG. 22). Related genes have been identified in human, mouse, and Drosophila. Bcu0399 shares 48% identity with the related full-length human sequence XM_{—}009330; 46% identity with its mouse homolog BC021367; and 41% identity with its fly homolog AE003546. The functions of these homologs are unknown, and all three lack the nucleotide-binding site of BCU399, indicating that they are functionally different from BCU399.

[0029] Because of the upregulation of BCU399 in breast cancer tissue, its polynucleotides, polypeptides, and peptides can be used as diagnostic, therapeutic, and research tools in breast cancer. Upregulation can be routinely assessed by, e.g., RT-PCR. Antibodies and other BCU399 ligands can be used to selectively target agents to breast tissue for purposes including, but not limited to, imaging, diagnostic, therapeutics, etc. In addition to its association with breast cancer, BCU399 is also expressed in lymphocytes and in adrenal, brain, kidney, lung, lymph node, breast, muscle, ovary, prostate, stomach, testis, thymus and thyroid tissue.

[0030] Imaging of tissues can be facilitated using agents such as BCU399 ligands that can be used to target contrast agents to a specific site in the body. Various imaging techniques have been used in this context, including, e.g., X-ray, CT, CAT, MRI, ultrasound, PET, SPECT, and scintographic. A reporter agent can be conjugated or associated routinely with a BCU399 ligand. Ultrasound contrast agents combined with ligands such as antibodies are described in, e.g., U.S. Pat. Nos 6,264,917; 6,254,852; 6,245,318; and 6,139,819. MRI contrast agents, such as metal chelators, radionucleotides, paramagnetic ions, etc., combined with selective targeting agents are also described in the literature, e.g., in U.S. Pat. Nos. 6,280,706 and 6,221,334. The methods described therein can be used generally to associate BCU399 and ligands thereof with an agent for any desired purpose.

[0031] An active agent can be associated in any manner with a BCU399 ligand that is effective to achieve its delivery to the target. The association of the active agent and the ligand (“coupling”) can be direct, e.g., through chemical bonds between the binding ligand and the agent or via a linking agent, or the association can be less direct, e.g., where the active agent is in a liposome, or other carrier, and the ligand is associated with the liposome surface. In such case, the ligand can be oriented in such a way that it is able to bind to BCU399 on the surfaces of breast tissue cells.

[0032] BCU399 maps to the chromosomal region 5q14.3. Consistent with its neuronal expression, a susceptibility to febrile seizures (Febrile Convulsions, Familial, 4) was mapped to this same chromosomal locus. Nakayama et al., Human Molecular Genetics, 9:87-91, 2000. In addition, several other diseases mapped to this location, including, e.g., Wagner syndrome and Usher syndrome, both disorders involved in eye disease. Black et al., Ophthalmology, 106:2074-2081, 1999. Pieke-Dahl et al., Journal of Medical Genetics, 37:256-262, 2000. Nucleic acids of the present invention can be used, e.g., as linkage markers, diagnostic targets, and therapeutic targets for any of the mentioned disorders, as well as any disorders or genes mapping in proximity of BCU399.

[0033] Its nucleotide binding properties make BCU399 polypeptides useful for assaying nucleotides such as ATP, GTP, etc. Various assay methods can be used, including filtration assays, column chromatography, etc. where labeled BCU399 polypeptides and/or nucleotides are used. BCU399 polypeptides or portions thereof including, e.g., the nucleotide binding motif and other motifs important in nucleotide binding can be used as a capture moiety. Various detection methods can be used. For example, nucleotide binding and relative concentration can be measured spectroscopically (e.g., EPR spectroscopy). BCU399 polypeptides or portions thereof can also be incorporated into column chromatography resins. After binding to the column resin, nucleotides can be chemically released and measured by commercially available bioluminescence assays (e.g., BioWhittaker ViaLight HS kit). Competitive binding assays can also be utiled, where concentration in an unknown sample is determined by its ability to compete with labeled nucleotide.

[0034] Useful human BCU399 polypeptides and corresponding nucleic acids include polypeptides comprising amino acids 1-127, 150487, 170-200, 230-250, 400420 and fragments thereof (See SEQ ID NO 100 and FIG. 22). Useful human BCU399 polypeptides and corresponding nucleic acids also include the nucleotide binding motif at about amino acids 53-60; extra-membrane loop sequences at about amino acids 1-105, 129-134, 158-171, 195-230, 254-267, 286-366, 390-457, and 481-487, and the motif for binding proteins, including G-proteins, at about amino acids 63-75 (See SEQ ID NO 100 and FIG. 22). The nucleic acids that code for BCU399 can be used for the generation of, e.g., nucleic acid probes, mutant sequences, including, e.g., chimeric sequences and antisense sequences, by PCR. BCU399 polypeptides and corresponding nucleic acids can be used, e.g., to generate antibodies for distinguishing between the human and monkey forms of BCU399. Its polypeptides and corresponding nucleic acids can be used to generate antibodies to the receptor surface to be used, e.g., as blocking agents in signal transduction pathways. The polypeptides or portions of them may be incorporated into resins for purification of ligands, e.g., G proteins, nucleotides, naturally-occurring ligands. The polypeptides can be used as competitors for ligand binding, e.g., ATP and G proteins, in ligand-binding assays.

[0035] BCU399 has several activities, including, e.g., nucleotide binding, ligand binding, signal transduction, phosphorylation, conformational change, etc. By “nucleotide binding” and “ligand binding” is meant the covalent or non-covalent association of a nucleotide, protein, or other molecule with one or more amino acids of BCU399, for example, as described in Merighi et al., British Journal of Pharmacology, 134:1215-26, 2001. By “signal transduction” is meant the activation of a chain of events that alters the concentration of one or more small intracellular signaling molecules (second messengers), e.g., cyclic AMP, calcium ions, as described in Sabala et al., British Journal of Pharmacology, 132:393-402, 2001. By “phosphorylation” is meant the covalent attachment to an amino acid, e.g., serine, threonine, tyrosine, etc., of a phosphate group from a nucleotide, e.g., ATP, GTP, etc., by means of a kinase, e.g., PK2, PKC, tyrosine kinase, etc. Hausdorff et al., FASEB Journal, 4:2881-2889, 1990. By “conformational change” is meant a change in the tertiary or quaternary structure of a polypeptide. Ballesteros et al., Molecular Pharmacology, 60:1-19, 2001. These activities can be determined routinely. For instance the binding affinity of nucleotides and other ligands can be measured with ligands fused to radioactive or fluorescent markers (e.g., γ³²P-ATP or green fluorescent protein) and visualized by phosphorimager analysis or fluorimetry. Signal transduction can be assessed by expression of BCU399 in cells, stimulation by appropriate ligands, e.g., nucleotides such as ATP, GTP, etc., or their analogs, and measurement of the concentrations of elicited second messengers or byproducts, e.g., Ca²⁺ or cAMP, by, e.g., atomic absorption spectrometry (ThermoElemental SOLAAR AA spectrometers), radioimmunoassay, etc. Phosphorylation can be assessed by, e.g., phosphorylation assay systems, (Perkin Elmer FlashPlate Plus). Conformational change can be assessed spectroscopically (circular dichroism, NMR spectroscopy) or using antibodies to specific conformations.

Human Kidins (PC473)

[0036] Human Kidins220Pc (kinase D-interacting substrate of 220 kDa) codes for a polypeptide containing 1715 amino acid. The nucleotide and amino acid sequences of Kidins220 are shown in SEQ ID NOS 88 and 89. It contains 11 ANK domains at about amino acid positions 37-66, 70-99, 103-132, 137-166, 170-199, 203-232, 236-265, 269-298, 302-331, 335-364, and 368-399. Four transmembrane domains are located at about amino acid positions 496-518, 525-547, 659-681, and 688-707. There is a SAM domain at about amino acids 1151-1223. It contains cAMP and cGMP protein linase phosphorylation site motifs at about 880-883, 901-904, 1250-1253, 1438-1441, and 1524-1527; protein kinase C phosphorylation site motifs at about 167-169, 219-221,233-235, 381-383, 471-473, 562-564, 590-592, 722-724, 791-793, 904-906, 939-941, 950-952, 998-1000, 1012-1014, 1034-1036, 1180-1182, 1298-1300, 1320-1322, 1351-1353, 1441-1443, 1567-1569, 1677-1679, and 1681-1683; ATP/GTP-binding site motif A (P-loop) at about amino acid positions 467-474; and tyrosine phosphorylation site motifs at 403-409 and 1397-1404. Its N- and C-terminus are cytoplasmic. A UniGene cluster is represented by Hs.9873.

[0037] There are several alternative forms of Kidins220Pc (.e.g., different sequences as a result of alternative splicing, etc.). AB033076 (FIG. 20; SEQ ID NOS 91) appears to a complete cDNA having an insertion of about 57 amino acids after human Kidins220Pc residue 1138, as well as containing an addition amino acid residue, Q, at about amino acid position 136. See, FIG. 20. AB033076 also has a six-amino acid extension at its N-terminus, LQLSVK (SEQ ID NO 92), which is not shown. XM_{—}045362 (FIG. 20; SEQ ID NOS 90) is a partial and incomplete EST for human Kidins220Pc, missing from about amino acid 1138. See, FIG. 20. It contains the above-mentioned insertion, making it closer to the AB033076 variant. In addition to the Q residue at position 136, the following sequences (polypeptide and corresponding nucleotide) can be used to distinguish the different forms: 1138-1184 (SEQ ID NO 90), 1138-1176(SEQ ID NO 90), 1177-1184 (SEQ ID NO 90), 1138-1194 (SEQ ID NO 91), or 1177-1194 (SEQ ID NO 91).

[0038] There are several rat homologs of human Kidins220. AF313464 (FIG. 20; SEQ ID NO 93) shares about 92% amino acid sequence identity and 95% amino acid homology along its entire length. Like the human Kidins220Pcform, this rat homolog does not contain the amino acid insertion present in AB033076, but it does contain the Q residue at 136. AF239045 (FIG. 20; SEQ ID NO 94) is another rat homolog, closer to the AB033076 form, having about 91% amino acid sequence identity and 93% amino acid homology along its entire length to human kidins220Pc. A C. elegans homolog is NM-069656 and a Drosophila homolog is AE003453.

[0039] All or part-of Kidins220 is located in genomic DNA represented by GenBank ID: AC012495.8 and Contig ID: NT_{—}022194. The present invention relates to any isolated introns and exons that are present in the gene. Intron and exon boundaries can be routinely determined, e.g., using the polypeptide and genomic sequences disclosed herein.

[0040] Human Kidins220Pc maps to chromosomal band 2p25.1. Hereditary essential tremor (OMIM 602134) maps to this location. Nucleic acids of the present invention can be used as linkage markers, diagnostic targets, therapeutic targets, for this disorder, as well as any disorders or genes mapping in proximity to it.

[0041] Kidins220 was originally identified as a substrate protein kinase D (“PKD”), a serine/threonine kinase regulated by diacylglycerol signaling pathways. See, Iglesias, J. Biol. Chem., 275:40048-40056, 2000. It is phosphorylated by PKD at the serine at position 919, and its first physiologically-occurring substrate. See, Iglesias et al.. Thus, human Kidin220Pc can used as a substrate in assays for PKD activity. See, e.g. Iglesias et al. for how such assays can be carried out.

[0042] In addition to its association with prostate cancer, Kidins220Pc expression can be affected in other tissues, as well. For example, Iglesias et al. reported that it is expressed at very high levels in the brain and has a role in neurite ougriwth, making it useful for the treatment and analysis of neurodegenerative diseases, including spinal cord injuries, Parkinson's disease, Alzheimer's disease, multiple sclerosis, traumatic head injury, etc. For example, modulation of human kidins220Pc can be utilized to regulate neurite outgrowth and subsequent synaptogenesis.

DEPTA Genes

[0043] DEPTA-1, -2, and -3 (Pcp409, Pcp461, and Pcp578, respectively) are differentially expressed prostate tumor antigen genes (“DEPTA”) that are highly up-regulated in prostate cancers. DEPTA-1 (SEQ ID NO 84) and DEPTA-2 (SEQ ID NO 85) are non-coding transcripts. DEPTA-2 is encoded by three exons. DEPTA-1 is only a single exon and is located in the intron region of DEPTA-2. The present invention relates to the nucleic fragments comprising the individual introns and exons of the DEPTA-½ cluster. Expression of DEPTA-1 is highly restricted to the prostate, and substantially no other tissues. DEPTA-2 is not as highly restricted to prostate, but is expressed in testis and stomach tissue, as well.

[0044] DEPTA-3 codes for a polypeptide containing 139 amino acids. The nucleotide and amino acid sequences of DEPTA-3 are shown in SEQ ID NOS 86 and 87. DEPTA-3 is a highly-charged polypeptide having a putative phosphorylation site at about amino acid residues 49-51. It has homology to other proteins which have binding activity, suggesting that it binds to a nucleic acid or protein binding partner. DEPTA-3 is expressed in normal prostate, as well as kidney, heart, stomach, pancreas, and thyroid.

[0045] All or part of DEPTA-3 is located in genomic DNA represented by GenBank ID: AC018601, BAC-ID: RP11-28G15, and Contig ID: NT_{—}0054207. Its 5′ end is associated with UniGene cluster Hs.135941. The present invention relates to any isolated introns and exons that are present in the gene. Intron and exon boundaries can be routinely determined, e.g., using the polypeptide and genomic sequences disclosed herein. DEPTA-3 maps to chromosomal band 2p13.

Other Genes

[0046] Membrane (i.e., cell-surface) proteins coded for by up-regulated genes (e.g., PCP0816) are useful targets for antibodies and other binding partners (e.g., ligands, aptamers, small peptides, etc.) to selectively target agents to a breast cancer tissue for any purpose, included, but not limited to, imaging, therapeutic, diagnostic, drug delivery, gene therapy, etc. For example, binding partners, such as antibodies, can be used to treat carcinomas in analogy to how c-erbB-2 antibodies are used to breast cancer. Membrane (e.g., PCP0405 when shed into the blood and other fluid) and extracellular proteins (e.g., PCP0389 or PCP0664) can also be used as diagnostic markers for cancer, and to assess the progress of the disease, e.g., in analogy to how PSA levels are used to diagnose prostate cancer. Useful antibodies or other binding partners include those that are specific for parts of the polypeptide which are exposed extracellularly as indicated in Table 1 and 4. Tables 3 and 4 summarize the expression profile of these genes.

[0047] Polynucleotides of the present invention can also be used to detect metastatic cells in the blood. For instance, PCP0389, PCP0814, PCP0424, PC0382, PCP0840, PCP0842, PCP0405, PC0177, PCP0677, and PCP0806 are absent from peripheral blood cells, and can therefore be used in diagnostic tests to assess whether prostate cancer cells have metastasized from the primary site.

[0048] Polynucleotides of the present invention have been mapped to specific chromosomal bands. Different human disorders are associated with these chromosome locations. See, Tables 2 and 5. The polynucleotides and polypeptides they encode can be used as linkage markers, diagnostic targets, therapeutic targets, for any of the mentioned disorders, as well as any disorders or genes mapping in proximity to them. Of particular interest are those genes which map to cancer loci, such as PCP0749, PCP0814, PCP0816, PCP0405, PCP0459, PCP0677, and PCP0762.

[0049] The present invention relates to the complete polynucleotide and polypeptide sequences disclosed herein, as well as fragments thereof Useful fragments include those which are unique and which do not overlap any known gene (e.g., amino acid residues 1-394 of SEQ ID NO 2 of PCP0749), which overlap with a known sequence (e.g., amino acids residues 395-1564 of SEQ ID NO 2 of PCP0749, which span alternative splice junctions (e.g., comprising amino acid residues 585-586 of PCP0424A of SEQ ID NO 18), which are unique to a public sequence as indicated in the figures (e.g., e.g., amino acids residues 2149-2265 of NM_{—}133433 of SEQ ID NO 35), which span an alternative splice junction of a public sequence (e.g., 532-533 of NM_{—}005690 of SEQ ID NO 40), etc. Unique sequences can also be described as being specific for a gene because they are characteristic of the gene, but not related genes. The unique or specific sequences included polypeptide sequences, coding nucleotide sequences (e.g., as illustrated in the figures), and non-coding nucleotide sequences.

[0050] Below, for illustration, are some examples of polypeptides (included are the polynucleotides which encode them); however, the present invention includes all fragments, especially of the categories mentioned above are exemplified below.

[0051] PCP0749 (SEQ ID NO 1-2):polypeptides comprising, consisting of, or consisting essentially of about amino acids 1-394, polypeptide fragments thereof, and polynucleotides encoding said polypeptides;

[0052] PCP0389 (SEQ ID NO 5-6): polypeptides comprising, consisting of, or consisting essentially of about amino acids 1-1-117, polypeptide fragments thereof, and polynucleotides encoding said polypeptides;

[0053] PCP0814 (SEQ ID NO 9-10): polypeptides comprising, consisting of, or consisting essentially of about amino acids 1-33, polypeptide fragments thereof, and polynucleotides encoding said polypeptides;

[0054] PCP0623 (SEQ ID NO 11-12): polypeptides comprising, consisting of, or consisting essentially of about amino acids 1-539, polypeptide fragments thereof, and polynucleotides encoding said polypeptides;

[0055] PCP0815 (SEQ ID NO 13-14): polypeptides comprising, consisting of, or consisting essentially of about amino acids 1-22, 964-1010, 1011-1041, polypeptide fragments thereof, and polynucleotides encoding said polypeptides;

[0056] PCP0840 (SEQ ID NO 15-16): polypeptides comprising, consisting of, or consisting essentially of about amino acids 1-129, polypeptide fragments thereof, and polynucleotides encoding said polypeptides;

[0057] PCP0424A (SEQ ID NO 17-18): polypeptides comprising, consisting of, or consisting essentially of about amino acids 1-53, 585-586, 586-611, polypeptide fragments thereof, and polynucleotides encoding said polypeptides;

[0058] PCP0424B (SEQ ID NO 19-20): polypeptides comprising, consisting of, or consisting essentially of about amino acids 1-53, 585-586, polypeptide fragments thereof, and polynucleotides encoding said polypeptides;

[0059] PCP0424C (SEQ ID NO 21-22): polypeptides comprising, consisting of, or consisting essentially of about amino acids 1-53, 585-586, polypeptide fragments thereof, and polynucleotides encoding said polypeptides;

[0060] PCP0816 (SEQ ID NO 25-26): polypeptides comprising, consisting of; or consisting essentially of about amino acids 268-317, 623, 992-1013, polypeptide fragments thereof, and polynucleotides encoding said polypeptides;

[0061] PCP0480 (SEQ ID NO 27-28): polypeptides comprising, consisting of; or consisting essentially of about amino acids 1-151, 152-171, polypeptide fragments thereof, and polynucleotides encoding said polypeptides;

[0062] PC0382 (SEQ ID NO 23-24): polypeptides comprising, consisting of, or consisting essentially of about amino acids 1-9, polypeptide fragments thereof, and polynucleotides encoding said polypeptides;

[0063] PCP0842 (SEQ ID NO 29-30): polypeptides comprising, consisting of, or consisting essentially of about amino acids 1-454, polypeptide fragments thereof, and polynucleotides encoding said polypeptides.

[0064] PCP405 (SEQ ID NO 45-46): polypeptides comprising, consisting of, or consisting essentially of about amino acids 1-351, 941, polypeptide fragments thereof, and polynucleotides encoding said polypeptides. PCP405 has high expression in the adrenal gland, brain and pituitary gland, and codes for a polypeptide which comprises domains characteristic of the attractins and other cell adhesion and guidance proteins. See, e.g., Duke-Cohan et al., Proc. Natl. Acad. Sci., 95:11336-11341, 1998.

[0065] PC0177A (SEQ ID NOS 54-55): polypeptides comprising, consisting of; or consisting essentially of about amino acids 1-85, 560-594, 1139-1167, 1167-1168, 1168-1744, polypeptide fragments thereof; and polynucleotides encoding said polypeptides; PC0177B (SEQ ID NOS 56-57): polypeptides comprising, consisting of, or consisting essentially of about amino acids 1-85, 559-560, 1104-1132, 1132-1133, 1132-1709, polypeptide fragments thereof, and polynucleotides encoding said polypeptides; PC0177C (SEQ ID NOS 58-59): polypeptides comprising, consisting of, or consisting essentially of about amino acids 1-85, 559-560, 11041132, 1703-1908, polypeptide fragments thereof, and polynucleotides encoding said polypeptides; PC0177D (SEQ ID NOS 60-61): polypeptides comprising, consisting of, or consisting essentially of about amino acids 1-85, 559-560, polypeptide fragments thereof, and polynucleotides encoding said polypeptides. PC0177 comprise coil-coil domains involved in protein interactions.

[0066] PCP454A (SEQ ID NO 50-51; FIG. 14): polypeptides comprising, consisting of, or consisting essentially of about amino acids 1-1890, polypeptide fragments thereof, and polynucleotides encoding said polypeptides. PCP454B (SEQ ID NOS 48-49) codes for a 577-amino acid polypeptide. This polypeptide comprises a nucleotide binding site which can be used to assay for its activity, e.g., by a filtration-type assay using radioactive ATP or other nucleotides. Nucleotide binding can also be used to purify the polypeptide, e.g., using a column comprising a nucleotide. PCP454A and B are contiguous, and a transcript has also been detected (SEQ ID NO 47) which comprises both open reading frames, where 454B is in the 5′ region, and about 2 kb down from it is 454A.

[0067] PCP0557 (SEQ ID 62-63): polypeptides comprising, consisting of, or consisting essentially of about amino acids 1-237, polypeptide fragments thereof, and polynucleotides encoding said polypeptides. PCP0557 polypeptide has a phosphoacceptor domain indicating that it is involved in signal transduction. This domain (e.g., amino acids 565-620) can be used as a substrate in kinase assays, e.g., as described in Kemp et al., “Design and use of peptide substrates for protein kinases,” Methods in Enzymol., 200:121-34, 1991; Wang et al., “Identification of the major site of rat prolactin phosphorylation as serine 177,” J. Biol. Chem., 271:2462-9, 1996; Yasuda et al., “A synthetic peptide substrate for selective assay of protein kinase C,” Biochem. Biophys. Res. Comm., 166:1220-7, 1990; Gonzalez et al., “Use of the synthetic peptide neurogranin(28-43) as a selective protein kinase C substrate in assays of tissue homogenates,” Anal. Biochem., 215:184-9, 1993; Parker et al., “Development of high throughput screening assays using fluorescence polarization: nuclear receptor-ligand-binding and kinase/phosphatase assays,” J. Biomol. Screen., 5:77-88, April 2000. See, also., U.S. Pat. Nos. 6,203,994, 6,074,861, 6,066,462, 6,004,757, and 5,741,689.

[0068] PCP0762 (SEQ ID NO 68-69): polypeptides comprising, consisting of, or consisting essentially of about amino acids 82-86, 113-221, polypeptide fragments thereof, and polynucleotides encoding said polypeptides. It contains a SCAN domain involved in transcriptional regulation.

[0069] PCP0806 (SEQ ID NO 70-71): polypeptides comprising, consisting of, or consisting essentially of about amino acids 31-32, polypeptide fragments thereof, and polynucleotides encoding said polypeptides. PC0806 is in an intracellular protein that shows high expression in lung, pancreas, prostate, and stomach.

[0070] PCP08 15A (SEQ ID NO 72-73): polypeptides comprising, consisting of, or consisting essentially of about amino acids 1-24, 131-1005, 744, polypeptide fragments thereof, and polynucleotides encoding said polypeptides; PCP0815C (SEQ ID NO 74-75): polypeptides comprising, consisting of, or consisting essentially of about amino acids 1-24, polypeptide fragments thereof, and polynucleotides encoding said polypeptides. The gene is expressed in many tissues, but is highest in brain and pituitary. PCP0815A comprises seven zinc finger domains, indicating that it is a transcriptional regulator. PCP0815C is missing these transcriptional domains, indicating that it can be a regulator (e.g., a negative regulator) of PCP0815A.

[0071] PCP0664 (SEQ ID NO 64-65) is a 122 amino acid polypeptide comprising an N-terminal hydrophobic region. It has a signal peptide cleavage site at about between amino acids 18 and 19, indicating that it can be a secreted molecule.

Nucleic Acids

[0072] A mammalian polynucleotide, or fragment thereof, of the present invention is a polynucleotide having a nucleotide sequence obtainable from a natural source. When the species name is used, e.g., a human, it indicates that the polynucleotide or polypeptide is obtainable from a natural source. It therefore includes naturally-occurring normal, naturally-occurring mutant, and naturally-occurring polymorphic alleles (e.g., SNPs), differentially-spliced transcripts, splice-variants, etc. By the term “naturally-occurring,” it is meant that the polynucleotide is obtainable from a natural source, e.g., animal tissue and cells, body fluids, tissue culture cells, forensic samples. Natural sources include, e.g., living cells obtained from tissues and whole organisms, tumors, cultured cell lines, including primary and immortalized cell lines. Naturally-occurring mutations can include deletions (e.g., a truncated amino- or carboxy-terminus), substitutions, inversions, or additions of nucleotide sequence. These genes can be detected and isolated by polynucleotide hybridization according to methods which one skilled in the art would know, e.g., as discussed below.

[0073] A polynucleotide according to the present invention can be obtained from a variety of different sources. It can be obtained from DNA or RNA, such as polyadenylated mRNA or total RNA, e.g., isolated from tissues, cells, or whole organism. The polynucleotide can be obtained directly from DNA or RNA, from a cDNA library, from a genomic library, etc. The polynucleotide can be obtained from a cell or tissue (e.g., from an embryonic or adult tissues) at a particular stage of development, having a desired genotype, phenotype, disease status, etc. A polynucleotide which “codes without interruption” refers to a polynucleotide having a continuous open reading frame (“ORF”) as compared to an ORF which is interrupted by introns or other noncoding sequences.

[0074] Polynucleotides and polypeptides (including any part of a differentially regulated cancer gene) can be excluded as compositions from the present invention if, e.g., listed in a publicly available databases on the day this application was filed and/or disclosed in a patent application having an earlier filing or priority date than this application and/or conceived and/or reduced to practice earlier than a polynucleotide in this application.

[0075] As described herein, the phrase “an isolated polynucleotide which is SEQ ID NO,” or “an isolated polynucleotide which is selected from SEQ ID NO,” refers to an isolated nucleic acid molecule from which the recited sequence was derived (e.g., a cDNA derived from mRNA; cDNA derived from genomic DNA). Because of sequencing errors, typographical errors, etc., the actual naturally-occurring sequence may differ from a SEQ ID listed herein. Thus, the phrase indicates the specific molecule from which the sequence was derived, rather than a molecule having that exact recited nucleotide sequence, analogously to how a culture depository number refers to a specific cloned fragment in a cryotube.

[0076] As explained in more detail below, a polynucleotide sequence of the invention can contain the complete sequence as shown in SEQ ID NOS 1, 3, 5, 7, 9, 11, 13, 15, 17, 19, 21, 23, 25, 27, 29, 45, 47, 50, 48, 52, 54, 56, 58, 60, 62, 64, 66, 68, 70, 72,74, 84, 85, 86, 88, 95, and/or 99, degenerate sequences thereof, anti-sense, muteins thereof, genes comprising said sequences, full-length cDNAs comprising said sequences, complete genomic sequences, fragments thereof, homologs, primers, nucleic acid molecules which hybridize thereto, derivatives thereof, etc.

Genomic

[0077] The present invention also relates genomic DNA from which the polynucleotides of the present invention can be derived. A genomic DNA coding for a human, mouse, or other mammalian polynucleotide, can be obtained routinely, for example, by screening a genomic library (e.g., a YAC library) with a polynucleotide of the present invention, or by searching nucleotide databases, such as GenBank and EMBL, for matches. Promoter and other regulatory regions (including both 5′ and 3′ regions, as well introns) can be identified upstream or downstream of coding and expressed RNAs, and assayed routinely for activity, e.g., by joining to a reporter gene (e.g., CAT, GFP, alkaline phosphatase, luciferase, galatosidase). A promoter obtained from a differentially regulated cancer gene can be used, e.g., in gene therapy to obtain tissue-specific expression of a heterologous gene (e.g., coding for a therapeutic product or cytotoxin). 5′ and 3′ sequences (including, UTRs and introns) can be used to modulate or regulate stability, transcription, and translation of nucleic acids, including the sequence to which is attached in nature, as well as heterologous nucleic acids.

Constructs

[0078] A polynucleotide of the present invention can comprise additional polynucleotide sequences, e.g., sequences to enhance expression, detection, uptake, cataloging, tagging, etc. A polynucleotide can include only coding sequence; a coding sequence and additional non-naturally occurring or heterologous coding sequence (e.g., sequences coding for leader, signal, secretory, targeting, enzymatic, fluorescent, antibiotic resistance, and other functional or diagnostic peptides); coding sequences and non-coding sequences, e.g., untranslated sequences at either a 5′ or 3′ end, or dispersed in the coding sequence, e.g., introns.

[0079] A polynucleotide according to the present invention also can comprise an expression control sequence operably linked to a polynucleotide as described above. The phrase “expression control sequence” means a polynucleotide sequence that regulates expression of a polypeptide coded for by a polynucleotide to which it is functionally (“operably”) linked. Expression can be regulated at the level of the mRNA or polypeptide. Thus, the expression control sequence includes mRNA-related elements and protein-related elements. Such elements include promoters, enhancers (viral or cellular), ribosome binding sequences, transcriptional terminators, etc. An expression control sequence is operably linked to a nucleotide coding sequence when the expression control sequence is positioned in such a manner to effect or achieve expression of the coding sequence. For example, when a promoter is operably linked 5′ to a coding sequence, expression of the coding sequence is driven by the promoter. Expression control sequences can include an initiation codon and additional nucleotides to place a partial nucleotide sequence of the present invention in-frame in order to produce a polypeptide (e.g., pET vectors from Promega have been designed to permit a molecule to be inserted into all three reading frames to identify the one that results in polypeptide expression). Expression control sequences can be heterologous or endogenous to the normal gene.

[0080] A polynucleotide of the present invention can also comprise nucleic acid vector sequences, e.g., for cloning, expression, amplification, selection, etc. Any effective vector can be used. A vector is, e.g., a polynucleotide molecule which can replicate autonomously in a host cell, e.g., containing an origin of replication. Vectors can be useful to perform manipulations, to propagate, and/or obtain large quantities of the recombinant molecule in a desired host. A skilled worker can select a vector depending on the purpose desired, e.g., to propagate the recombinant molecule in bacteria, yeast, insect, or mammalian cells. The following vectors are provided by way of example. Bacterial: pQE70, pQE60 pQE-9 (Qiagen), pBS, pD10, Phagescript, phiX174, pBK Phagemid, pNH8A, pNH16a, pNH18Z, pNH46A (Stratagene); Bluescript KS+II (Stratagene); ptrc99a, pKK223-3, pKK233-3, pDR54 0, pRIT5 (Pharmacia). Eukaryotic: PWLNEO, pSV2CAT, pOG44, pXT1, pSG (Stratagene), pSVK3, PBPV, PMSG, pSVL (Pharmacia), pCR2.1/TOPO, pCRII/TOPO, pCR4/TOPO, pTrcHisB, pCMV6-XLA, etc. However, any other vector, e.g., plasmids, viruses, or parts thereof, may be used as long as they are replicable and viable in the desired host. The vector can also comprise sequences which enable it to replicate in the host whose genome is to be modified.

Hybridization

[0081] Polynucleotide hybridization, as discussed in more detail below, is useful in a variety of applications, including, in gene detection methods, for identifying mutations, for making mutations, to identify homologs in the same and different species, to identify related members of the same gene family, in diagnostic and prognostic assays, in therapeutic applications (e.g., where an antisense polynucleotide is used to inhibit expression), etc.

[0082] The ability of two single-stranded polynucleotide preparations to hybridize together is a measure of their nucleotide sequence complementarity, e.g., base-pairing between nucleotides, such as A-T, G-C, etc. The invention thus also relates to polynucleotides, and their complements, which hybridize to a polynucleotide comprising a nucleotide sequence as set forth in SEQ ID NOS 1, 3, 5, 7, 9, 11, 13, 15, 17, 19, 21, 23, 25, 27, 29, 45, 47, 50, 48, 52, 54, 56, 58, 60, 62, 64, 66, 68, 70, 72, 74, 84, 85, 86, 88, 95, and/or 99 and genomic sequences thereof. A nucleotide sequence hybridizing to the latter sequence will have a complementary polynucleotide strand, or act as a template for one in the presence of a polymerase (i.e., an appropriate polynucleotide synthesizing enzyme). The present invention includes both strands of polynucleotide, e.g., a sense strand and an anti-sense strand.

[0083] Hybridization conditions can be chosen to select polynucleotides which have a desired amount of nucleotide complementarity with the nucleotide sequences set forth in SEQ ID NOS 1, 3, 5, 7, 9, 11, 13, 15, 17, 19, 21, 23, 25, 27, 29, 45, 47, 50, 48, 52, 54, 56, 58, 60, 62, 64, 66, 68, 70, 72, 74, 84, 85, 86, 88, 95, and/or 99 and genomic sequences thereof. A polynucleotide capable of hybridizing to such sequence, preferably, possesses, e.g., about 70%, 75%, 80%, 85%, 87%, 90%, 92%, 95%, 97%, 99%, or 100% complementarity, between the sequences. The present invention particularly relates to polynucleotide sequences which hybridize to the nucleotide sequences set forth in SEQ ID NOS 1, 3, 5, 7, 9, 11, 13, 15, 17, 19, 21, 23, 25, 27, 29, 45, 47, 50, 48, 52, 54, 56, 58, 60, 62, 64, 66, 68, 70, 72, 74, 84, 85, 86, 88, 95, and/or 99 or genomic sequences thereof, under low or high stringency conditions. These conditions can be used, e.g., to select corresponding homologs in non-human species.

[0084] Polynucleotides which hybridize to polynucleotides of the present invention can be selected in various ways. Filter-type blots (i.e., matrices containing polynucleotide, such as nitrocellulose), glass chips, and other matrices and substrates comprising polynucleotides (short or long) of interest, can be incubated in a prehybridization solution (e.g., 6×SSC, 0.5% SDS, 100 μg/ml denatured salmon sperm DNA, 5× Denhardt's solution, and 50% formamide), at 22-68° C., overnight, and then hybridized with a detectable polynucleotide probe under conditions appropriate to achieve the desired stringency. In general, when high homology or sequence identity is desired, a high temperature can be used (e.g., 65 ° C.). As the homology drops, lower washing temperatures are used. For salt concentrations, the lower the salt concentration, the higher the stringency. The length of the probe is another consideration. Very short probes (e.g., less than 100 base pairs) are washed at lower temperatures, even if the homology is high. With short probes, formainde can be omitted. See, e.g., Current Protocols in Molecular Biology, Chapter 6, Screening of Recombinant Libraries; Sambrook et al., Molecular Cloning, 1989, Chapter 9.

[0085] For instance, high stringency conditions can be achieved by incubating the blot overnight (e.g., at least 12 hours) with a polynucleotide probe in a hybridization solution containing, e.g., about 5×SSC, 0.5% SDS, 100 μg/ml denatured salmon sperm DNA and 50% formamide, at 42° C., or hybridizing at 42° C. in 5×SSPE, 0.5% SDS, and 50% formamide, 100 μg/ml denatured salmon sperm DNA, and washing at 65° C. in 0.1% SSC and 0.1% SDS.

[0086] Blots can be washed at high stringency conditions that allow, e.g., for less than 5% bp mismatch (e.g., wash twice in 0.1% SSC and 0.1% SDS for 30 min at 65° C.), i.e., selecting sequences having 95% or greater sequence identity.

[0087] Other non-limiting examples of high stringency conditions includes a final wash at 65° C. in aqueous buffer containing 30 mM NaCl and 0.5% SDS. Another example of high stringent conditions is hybridization in 7% SDS, 0.5 M NaPO₄, pH 7, 1 mM EDTA at 50° C., e.g., overnight, followed by one or more washes with a 1% SDS solution at 42° C. Whereas high stringency washes can allow for, e.g., less than 10%, less than 5% mismatch, etc., reduced or low stringency conditions can permit up to 20% nucleotide mismatch. Hybridization at low stringency can be accomplished as above, but using lower formamide conditions, lower temperatures and/or lower salt concentrations, as well as longer periods of incubation time.

[0088] Hybridization can also be based on a calculation of melting temperature (Tm) of the hybrid formed between the probe and its target, as described in Sambrook et al. Generally, the temperature Tm at which a short oligonucleotide (containing 18 nucleotides or fewer) will melt from its target sequence is given by the following equation: Tm =(number of A's and T's)×2° C.+(number of C's and G's)×4° C. For longer molecules, Tm=81.5+16.6 log₁₀[Na⁺]+0.41(% GC)−600/N where [Na⁺] is the molar concentration of sodium ions, % GC is the percentage of GC base pairs in the probe, and N is the length. Hybridization can be carried out at several degrees below this temperature to ensure that the probe and target can hybridize. Mismatches can be allowed for by lowering the temperature even further.

[0089] Stringent conditions can be selected to isolate sequences, and their complements, which have, e.g., at least about 90%, 95%, 97%, or more, etc., nucleotide complementarity between the probe (e.g., a short polynucleotide of SEQ ED NOS 1, 3, 5, 7, 9, 11, 13, 15, 17, 19, 21, 23, 25, 27, 29, 45, 47, 50, 48, 52, 54, 56, 58, 60, 62, 64, 66, 68, 70, 72, 74, 84, 85, 86, 88, 95, and/or 99 or genomic sequences thereof) and a target polynucleotide.

[0090] Other homologs of polynucleotides of the present invention can be obtained from mammalian and non-mammalian sources according to various methods. For example, hybridization with a polynucleotide can be employed to select homologs, e.g., as described in Sambrook et al., Molecular Cloning, Chapter 11, 1989. Such homologs can have varying amounts of nucleotide and amino acid sequence identity and similarity to such polynucleotides of the present invention. Mammalian organisms include, e.g., mice, rats, monkeys, pigs, cows, etc. Non-mammalian organisms include, e.g., vertebrates, invertebrates, zebra fish, chicken, Drosophila, C. elegans, Xenopus, yeast such as S. pombe, S. cerevisiae, roundworms, prokaryotes, plants, Arabidopsis, artemia, viruses, etc. The degree of nucleotide sequence identity between human and mouse can be about, e.g. 70% or more, 85% or more for open reading frames, etc.

Alignment

[0091] Alignments can be accomplished by using any effective algorithm. For pairwise alignments of DNA sequences, the methods described by Wilbur-Lipman (e.g., Wilbur and Lipman, Proc. Natl. Acad Sci., 80:726-730, 1983) or Martinez/Needleman-Wunsch (e.g., Martinez, Nucleic Acid Res., 11:4629-4634, 1983) can be used. For instance, if the Martinez/Needleman-Wunsch DNA alignment is applied, the minimum match can be set at 9, gap penalty at 1.10, and gap length penalty at 0.33. The results can be calculated as a similarity index, equal to the sum of the matching residues divided by the sum of all residues and gap characters, and then multiplied by 100 to express as a percent. Similarity index for related genes at the nucleotide level in accordance with the present invention can be greater than 70%, 80%, 85%, 90%, 95%, 99%, or more. Pairs of protein sequences can be aligned by the Lipman-Pearson method (e.g., Lipman and Pearson, Science, 227:1435-1441, 1985) with k-tuple set at 2, gap penalty set at 4, and gap length penalty set at 12. Results can be expressed as percent similarity index, where related genes at the amino acid level in accordance with the present invention can be greater than 65%, 70%, 75%, 80%, 85%, 90%, 95%, 99%, or more. Various commercial and free sources of alignment programs are available, e.g., MegAlign by DNA Star, BLAST (National Center for Biotechnology Information), BCM (Baylor College of Medicine) Launcher, etc. BLAST can be used to calculate amino acid sequence identity, amino acid sequence homology, and nucleotide sequence identity. These calculations can be made along the entire length of each of the target sequences which are to be compared.

[0092] Afler two sequences have been aligned, a “percent sequence identity” can be determined. For these purposes, it is convenient to refer to a Reference Sequence and a Compared Sequence, where the Compared Sequence is compared to the Reference Sequence. Percent sequence identity can be determined according to the following formula: Percent Identity=100 [1−(C/R)], wherein C is the number of differences between the Reference Sequence and the Compared Sequence over the length of alignment between the Reference Sequence and the Compared Sequence where (i) each base or amino acid in the Reference Sequence that does not have a corresponding aligned base or amino acid in the Compared Sequence, (ii) each gap in the Reference Sequence, (iii) each aligned base or amino acid in the Reference Sequence that is different from an aligned base or amino acid in the Compared Sequence, constitutes a difference; and R is the number of bases or amino acids in the Reference Sequence over the length of the alignment with the Compared Sequence with any gap created in the Reference Sequence also being counted as a base or amino acid.

[0093] Percent sequence identity can also be determined by other conventional methods, e.g., as described in Altschul et al., Bull. Math. Bio. 48: 603-616, 1986 and Henikoff and Henikoff, Proc. Natl. Acad. Sci. USA 89:10915-10919, 1992.

Specific Polynucleotide Probes

[0094] A polynucleotide of the present invention can comprise any continuous nucleotide sequence of SEQ ID NOS 1, 3, 5, 7, 9, 11, 13, 15, 17, 19, 21, 23, 25, 27, 29, 45, 47, 50, 48, 52, 54, 56, 58, 60, 62, 64, 66, 68, 70, 72, 74, 84, 85, 86, 88, 95, and/or 99, sequences which share sequence identity thereto, or complements thereof. The term “probe” refers to any substance that can be used to detect, identify, isolate, etc., another substance. A polynucleotide probe is comprised of nucleic acid can be used to detect, identify, etc., other nucleic acids, such as DNA and RNA.

[0095] These polynucleotides can be of any desired size that is effective to achieve the specificity desired. For example, a probe can be from about 7 or 8 nucleotides to several thousand nucleotides, depending upon its use and purpose. For instance, a probe used as a primer PCR can be shorter than a probe used in an ordered array of polynucleotide probes. Probe sizes vary, and the invention is not limited in any way by their size, e.g., probes can be from about 7-2000 nucleotides, 7-1000, 8-700, 8-600, 8-500, 8-400, 8-300, 8-150, 8-100, 8-75, 7-50, 10-25, 14-16,at least about 8, at least about 10, 11, 12, 13, 14, 15, 16, 17, 18, 19, 20, 21, 22, 23, 24, 25, 26, or more, etc. The polynucleotides can have non-naturally-occurring nucleotides, e.g., inosine, AZT, 3TC, etc. The polynucleotides can have 100% sequence identity or complementarity to a sequence of SEQ ID NOS 1, 3, 5, 7, 9, 11, 13, 15, 17, 19, 21, 23, 25, 27, 29, 45, 47, 50, 48, 52, 54, 56, 58, 60, 62, 64, 66, 68, 70, 72, 74, 84, 85, 86, 88, 95, and/or 99, or it can have mismatches or nucleotide substitutions, e.g., 1, 2, 3, 4, or 5 substitutions. The probes can be single-stranded or double-stranded.

[0096] In accordance with the present invention, a polynucleotide can be present in a kit, where the kit includes, e.g., one or more polynucleotides, a desired buffer (e.g., phosphate, tris, etc.), detection compositions, RNA or cDNA from different tissues to be used as controls, libraries, etc. The polynucleotide can be labeled or unlabeled, with radioactive or non-radioactive labels as known in the art. Kits can comprise one or more pairs of polynucleotides for amplifying nucleic acids specific for differentially regulated cancer genes, e.g., comprising a forward and reverse primer effective in PCR. These include both sense and anti-sense orientations. For instance, in PCR-based methods (such as RT-PCR), a pair of primers are typically used, one having a sense sequence and the other having an antisense sequence.

[0097] Another aspect of the present invention is a nucleotide sequence that is specific to, or for, a selective polynucleotide. The phrases “specific for” or “specific to” a polynucleotide have a functional meaning that the polynucleotide can be used to identify the presence of one or more target genes in a sample and distinguish them from non-target genes. It is specific in the sense that it can be used to detect polynucleotides above background noise (“non-specific binding”). A specific sequence is a defined order of nucleotides (or amino acid sequences, if it is a polypeptide sequence) which occurs in the polynucleotide, e.g., in the nucleotide sequences of SEQ ID NOS 1, 3, 5, 7, 9, 11, 13, 15, 17, 19,21, 23, 25, 27, 29, 45, 47, 50, 48, 52, 54, 56, 58, 60, 62, 64, 66, 68, 70, 72, 74, 84, 85, 86, 88, 95, and/or 99, and which is characteristic of that target sequence, and substantially no non-target sequences. A probe or mixture of probes can comprise a sequence or sequences that are specific to a plurality of target sequences, e.g., where the sequence is a consensus sequence, a functional domain, etc., e.g., capable of recognizing a family of related genes. Such sequences can be used as probes in any of the methods described herein or incorporated by reference. Both sense and antisense nucleotide sequences are included. A specific polynucleotide according to the present invention can be determined routinely.

[0098] A polynucleotide comprising a specific sequence can be used as a hybridization probe to identify the presence of, e.g., human or mouse polynucleotide, in a sample comprising a mixture of polynucleotides, e.g., on a Northern blot. Hybridization can be performed under high stringent conditions (see, above) to select polynucleotides (and their complements which can contain the coding sequence) having at least 90%, 95%, 99%, etc., identity (i.e., complementarity) to the probe, but less stringent conditions can also be used. A specific polynucleotide sequence can also be fused in-flame, at either its 5′ or 3′ end, to various nucleotide sequences as mentioned throughout the patent, including coding sequences for enzymes, detectable markers, GFP, etc, expression control sequences, etc.

[0099] A polynucleotide probe, especially one that is specific to a polynucleotide of the present invention, can be used in gene detection and hybridization methods as already described. In one embodiment, a specific polynucleotide probe can be used to detect whether a particular tissue or cell-type is present in a target sample. To carry out such a method, a selective polynucleotide can be chosen which is characteristic of the desired target tissue. Such polynucleotide is preferably chosen so that it is expressed or displayed in the target tissue, but not in other tissues which are present in the sample. For instance, if detection of prostate or breast cancer is desired, it may not matter whether the selective polynucleotide is expressed in other tissues, as long as it is not expressed in cells normally present in blood, e.g., peripheral blood mononuclear cells. Starting from the selective polynucleotide, a specific polynucleotide probe can be designed which hybridizes (if hybridization is the basis of the assay) under the hybridization conditions to the selective polynucleotide, whereby the presence of the selective polynucleotide can be determined.

[0100] Probes which are specific for polynucleotides of the present invention can also be prepared using involve transcription-based systems, e.g., incorporating an RNA polymerase promoter into a selective polynucleotide of the present invention, and then transcribing anti-sense RNA using the polynucleotide as a template. See, e.g., U.S. Pat. No. 5,545,522.

Polynucleotide Composition

[0101] A polynucleotide according to the present invention can comprise, e.g., DNA, RNA, synthetic polynucleotide, peptide polynucleotide, modified nucleotides, dsDNA, ssDNA, ssRNA, dsRNA, and mixtures thereof. A polynucleotide can be single- or double-stranded, triplex, DNA:RNA, duplexes, comprise hairpins, and other secondary structures, etc. Nucleotides comprising a polynucleotide can be joined via various known linkages, e.g., ester, sulfamate, sulfamide, phosphorothioate, phosphoramidate, methylphosphonate, carbamate, etc., depending on the desired purpose, e.g., resistance to nucleases, such as RNAse H, improved in vivo stability, etc. See, e.g., U.S. Pat. No. 5,378,825. Any desired nucleotide or nucleotide analog can be incorporated, e.g., 6-mercaptoguanine, 8-oxo-guanine, etc.

[0102] Various modifications can be made to the polynucleotides, such as attaching detectable markers (avidin, biotin, radioactive elements, fluorescent tags and dyes, energy transfer labels, energy-emitting labels, binding partners, etc.) or moieties which improve hybridization, detection, and/or stability. The polynucleotides can also be attached to solid supports, e.g., nitrocellulose, magnetic or paramagnetic microspheres (e.g., as described in U.S. Pat. No. 5,411,863; U.S. Pat. No. 5,543,289; for instance, comprising ferromagnetic, supermagnetic, paramagnetic, superparamagnetic, iron oxide and polysaccharide), nylon, agarose, diazotized cellulose, latex solid microspheres, polyacrylamides, etc., according to a desired method. See, e.g., U.S. Pat. Nos. 5,470,967, 5,476,925, and 5,478,893.

[0103] Polynucleotide according to the present invention can be labeled according to any desired method. The polynucleotide can be labeled using radioactive tracers such as ³²P, ³⁵S, ³H, or ¹⁴C, to mention some commonly used tracers. The radioactive labeling can be carried out according to any method, such as, for example, terminal labeling at the 3′ or 5′ end using a radiolabeled nucleotide, polynucleotide kinase (with or without dephosphorylation with a phosphatase) or a ligase (depending on the end to be labeled). A non-radioactive labeling can also be used, combining a polynucleotide of the present invention with residues having immunological properties (antigens, haptens), a specific affinity for certain reagents (ligands), properties enabling detectable enzyme reactions to be completed (enzymes or coenzymes, enzyme substrates, or other substances involved in an enzymatic reaction), or characteristic physical properties, such as fluorescence or the emission or absorption of light at a desired wavelength, etc.

Nucleic Acid Detection Methods

[0104] Another aspect of the present invention relates to methods and processes for detecting differentially regulated cancer genes. Detection methods have a variety of applications, including for diagnostic, prognostic, forensic, and research applications. To accomplish gene detection, a polynucleotide in accordance with the present invention can be used as a “probe.” The term “probe” or “polynucleotide probe” has its customary meaning in the art, e.g., a polynucleotide which is effective to identify (e.g., by hybridization), when used in an appropriate process, the presence of a target polynucleotide to which it is designed. Identification can involve simply determining presence or absence, or it can be quantitative, e.g., in assessing amounts of a gene or gene transcript present in a sample. Probes can be useful in a variety of ways, such as for diagnostic purposes, to identify homologs, and to detect, quantitate, or isolate a polynucleotide of the present invention in a test sample.

[0105] Assays can be utilized which permit quantification and/or presencelabsence detection of a target nucleic acid in a sample. Assays can be performed at the single-cell level, or in a sample comprising many cells, where the assay is “averaging” expression over the entire collection of cells and tissue present in the sample. Any suitable assay format can be used, including, but not limited to, e.g., Southern blot analysis, Northern blot analysis, polymerase chain reaction (CTCR”) (e.g., Saiki et al., Science, 241:53, 1988; U.S. Pat. Nos. 4,683,195, 4,683,202, and 6,040,166; PCR Protocols: A Guide to Methods and Applications, Innis et al., eds., Academic Press, New York, 1990), reverse transcriptase polymerase chain reaction (“RT-PCR”), anchored PCR, rapid amplification of cDNA ends (“RACE”) (e.g., Schaefer in Gene Cloning and Analysis: Current Innovations, Pages 99-115, 1997), ligase chain reaction (“LCR”) (EP 320 308), one-sided PCR (Ohara et al., Proc. Natl. Acad. Sci., 86:5673-5677, 1989), indexing methods (e.g., U.S. Pat. No. 5,508,169), in situ hybridization, differential display (e.g., Liang et al., Nucl. Acid. Res., 21:3269-3275, 1993; U.S. Pat. Nos. 5,262,311, 5,599,672 and 5,965,409; W097/18454; Prashar and Weissman, Proc. Natl. Acad. Sci., 93:659-663, and U.S. Pat. Nos. 6,010,850 and 5,712,126; Welsh et al., Nucleic Acid Res., 20:4965-4970, 1992, and U.S. Pat. No. 5,487,985) and other RNA fingerprinting techniques, nucleic acid sequence based amplification (“NASBA”) and other transcription based amplification systems (e.g., U.S. Pat. Nos. 5,409,818 and 5,554,527; WO 88/10315), polynucleotide arrays (e.g., U.S. Pat. Nos. 5,143,854, 5,424,186; 5,700,637, 5,874,219, and 6,054,270; PCT WO 92/10092; PCT WO 90/15070), Qbeta Replicase (PCT/US87/00880), Strand Displacement Amplification (“SDA”), Repair Chain Reaction (“RCR”), nuclease protection assays, subtraction-based methods, Rapid-Scan™, etc. Additional useful methods include, but are not limited to, e.g., template-based amplification methods, competitive PCR (e.g., U.S. Pat. No. 5,747,251), redox-based assays (e.g., U.S. Pat. No. 5,871,918), Taqman-based assays (e.g., Holland et al., Proc. Natl. Acad, Sci., 88:7276-7280, 1991; U.S. Pat. Nos. 5,210,015 and 5,994,063), real-time fluorescence-based monitoring (e.g., U.S. Pat. 5,928,907), molecular energy transfer labels (e.g., U.S. Pat. Nos. 5,348,853, 5,532,129, 5,565,322, 6,030,787, and 6,117,635; Tyagi and Kramer, Nature Biotech., 14:303-309, 1996). Any method suitable for single cell analysis of gene or protein expression can be used, including in situ hybridization, immunocytochemistry, MACS, FACS, flow cytometry, etc. For single cell assays, expression products can be measured using antibodies, PCR, or other types of nucleic acid amplification (e.g., Brady et al., Methods Mol. & Cell. Biol. 2, 17-25, 1990; Eberwine et al., 1992, Proc. Natl. Acad. Sci., 89, 3010-3014, 1992; U.S. Pat No. 5,723,290). These and other methods can be carried out conventionally, e.g., as described in the mentioned publications.

[0106] Many of such methods may require that the polynucleotide is labeled, or comprises a particular nucleotide type useful for detection. The present invention includes such modified polynucleotides that are necessary to carry out such methods. Thus, polynucleotides can be DNA, RNA, DNA:RNA hybrids, PNA, etc., and can comprise any modification or substituent which is effective to achieve detection.

[0107] Detection can be desirable for a variety of different purposes, including research, diagnostic, prognostic, and forensic. For diagnostic purposes, it may be desirable to identify the presence or quantity of a polynucleotide sequence in a sample, where the sample is obtained from tissue, cells, body fluids, etc. In a preferred method as described in more detail below, the present invention relates to a method of detecting a polynucleotide comprising, contacting a target polynucleotide in a test sample with a polynucleotide probe under conditions effective to achieve hybridization between the target and probe; and detecting hybridization.

[0108] Any test sample in which it is desired to identify a polynucleotide or polypeptide thereof can be used, including, e.g., blood, urine, saliva, stool (for extracting nucleic acid, see, e.g., U.S. Pat. No. 6,177,251), swabs comprising tissue, biopsied tissue, tissue sections, cultured cells, etc.

[0109] Polynucleotides can be used in wide range of methods and compositions, including for detecting, diagnosing, staging, grading, assessing, prognosticating, etc. diseases and disorders associated with differentially regulated cancer genes, for monitoring or assessing therapeutic and/or preventative measures, in ordered arrays, etc. Any method of detecting genes and polynucleotides can be used; certainly, the present invention is not to be limited how such methods are implemented.

[0110] Along these lines, the present invention relates to methods of detecting differentially regulated cancer genes in a sample comprising nucleic acid. Such methods can comprise one or more the following steps in any effective order, e.g., contacting said sample with a polynucleotide probe under conditions effective for said probe to hybridize specifically to nucleic acid in said sample, and detecting the presence or absence of probe hybridized to nucleic acid in said sample, wherein said probe is a polynucleotide which is selected from SEQ ID NOS 1, 3, 5, 7, 9, 11, 13, 15, 17, 19, 21, 23, 25, 27, 29, 45, 47, 50, 48, 52, 54, 56, 58, 60, 62, 64, 66, 68, 70, 72, 74, 84, 85, 86, 88, 95, and/or 99, a polynucleotide having, e.g., about 70%, 80%, 85%, 90%, 95%, 99%, or more sequence identity thereto, effective or specific framents thereof, or complements thereto. The detection method can be applied to any sample, e.g., cultured primary, secondary, or established cell lines, tissue biopsy, blood, urine, stool, cerebral spinal fluid, and other bodily fluids, for any purpose.

[0111] Contacting the sample with probe can be carried out by any effective means in any effective environment It can be accomplished in a solid, liquid, frozen, gaseous, amorphous, solidified, coagulated, colloid, etc., mixtures thereof, matrix. For instance, a probe in an aqueous medium can be contacted with a sample which is also in an aqueous medium, or which is affixed to a solid matrix, or vice-versa.

[0112] Generally, as used throughout the specification, the term “effective conditions” means, e.g., the particular milieu in which the desired effect is achieved. Such a milieu, includes, e.g., appropriate buffers, oxidizing agents, reducing agents, pH, co-factors, temperature, ion concentrations, suitable age and/or stage of cell (such as, in particular part of the cell cycle, or at a particular stage where particular genes are being expressed) where cells are being used, culture conditions (including substrate, oxygen, carbon dioxide, etc.). When hybridization is the chosen means of achieving detection, the probe and sample can be combined such that the resulting conditions are functional for said probe to hybridize specifically to nucleic acid in said sample.

[0113] The phrase “hybridize specifically” indicates that the hybridization between single-stranded polynucleotides is based on nucleotide sequence complementarity. The effective conditions are selected such that the probe hybridizes to a preselected and/or definite target nucleic acid in the sample. For instance, if detection of a polynucleotide set forth in SEQ ID NOS 1, 3, 5, 7, 9, 11, 13, 15, 17, 19, 21, 23, 25, 27, 29, 45, 47, 50, 48, 52, 54, 56, 58, 60, 62, 64, 66, 68, 70, 72, 74, 84, 85, 86, 88, 95, and/or 99 is desired, a probe can be selected which can hybridize to such target gene under high stringent conditions, without significant hybridization to other genes in the sample. To detect homologs of a polynucleotide set forth in SEQ ID NOS 1, 3, 5, 7, 9, 11, 13, 15, 17, 19, 21, 23, 25, 27, 29, 45, 47, 50, 48, 52, 54, 56, 58, 60, 62, 64, 66, 68, 70, 72, 74, 84, 85, 86, 88, 95, and/or 99, the effective hybridization conditions can be less stringent, and/or the probe can comprise codon degeneracy, such that a homolog is detected in the sample.

[0114] As already mentioned, the methods can be carried out by any effective process, e.g., by Northern blot analysis, polymerase chain reaction (PCR), reverse transcriptase PCR, RACE PCR, in situ hybridization, etc., as indicated above. When PCR based techniques are used, two or more probes are generally used. One probe can be specific for a defined sequence which is characteristic of a selective polynucleotide, but the other probe can be specific for the selective polynucleotide, or specific for a more general sequence, e.g., a sequence such as polyA which is characteristic of mRNA, a sequence which is specific for a promoter, ribosome binding site, or other transcriptional features, a consensus sequence (e.g., representing a functional domain). For the former aspects, 5′ and 3′ probes (e.g., polyA, Kozak, etc.) are preferred which are capable of specifically hybridizing to the ends of transcripts. When PCR is utilized, the probes can also be referred to as “primers” in that they can prime a DNA polymerase reaction.

[0115] In addition to testing for the presence or absence of polynucleotides, the present invention also relates to determining the amounts at which polynucleotides of the present invention are expressed in sample and determining the differential expression of such polynucleotides in samples. Such methods can involve substantially the same steps as described above for presence/absence detection, e.g., contacting with probe, hybridizing, and detecting hybridized probe, but using more quantitative methods and/or comparisons to standards.

[0116] The amount of hybridization between the probe and target can be determined by any suitable methods, e.g., PCR, RT-PCR, RACE PCR, Northern blot, polynucleotide microarrays, Rapid-Scan, etc., and includes both quantitative and qualitative measurements. For further details, see the hybridization methods described above and below. Determining by such hybridization whether the target is differentially expressed (e.g., up-regulated or down-regulated) in the sample can also be accomplished by any effective means. For instance, the target's expression pattern in the sample can be compared to its pattern in a known standard, such as in a normal tissue, or it can be compared to another gene in the same sample. When a second sample is utilized for the comparison, it can be a sample of normal tissue that is known not to contain diseased cells. The comparison can be performed on samples which contain the same amount of RNA (such as polyadenylated RNA or total RNA), or, on RNA extracted from the same amounts of starting tissue. Such a second sample can also be referred to as a control or standard. Hybridization can also be compared to a second target in the same tissue sample. Experiments can be performed that determine a ratio between the target nucleic acid and a second nucleic acid (a standard or control), e.g., in a normal tissue. When the ratio between the target and control are substantially the same in a normal and sample, the sample is determined or diagnosed not to contain cells. However, if the ratio is different between the normal and sample tissues, the sample is determined to contain cancer cells. The approaches can be combined, and one or more second samples, or second targets can be used. Any second target nucleic acid can be used as a comparison, including “housekeeping” genes, such as beta-actin, alcohol dehydrogenase, or any other gene whose expression does not vary depending upon the disease status of the cell.

Methods of Identifying Polymorphisms, Mutations, etc., of Differentially Regulated Cancer Genes

[0117] Polynucleotides of the present invention can also be utilized to identify mutant alleles, SNPs, gene rearrangements and modifications, and other polymorphisms of the wild-type gene. Mutant alleles, polymorphisms, SNPs, etc., can be identified and isolated from subjects with diseases that are known, or suspected to have, a genetic component. Identification of such genes can be carried out routinely (see, above for more guidance), e.g., using PCR, hybridization techniques, direct sequencing, mismatch reactions (see, e.g., above), RFLP analysis, SSCP (e.g., Orita et al., Proc. Natl. Acad. Sci., 86:2766, 1992), etc., where a polynucleotide having a sequence selected from SEQ ID NOS 1, 3, 5, 7, 9, 11, 13, 15, 17, 19, 21, 23, 25, 27, 29, 45, 47, 50, 48, 52, 54, 56, 58, 60, 62, 64, 66, 68, 70, 72, 74, 84, 85, 86, 88, 95, and/or 99 is used as a probe. The selected mutant alleles, SNPs, polymorphisms, etc., can be used diagnostically to determine whether a subject has, or is susceptible to a disorder associated with differentially regulated cancer genes, as well as to design therapies and predict the outcome of the disorder. Methods involve, e.g., diagnosing a disorder associated with differentially regulated cancer genes or determining susceptibility to a disorder, comprising, detecting the presence of a mutation in a gene represented by a polynucleotide selected from SEQ ID NOS 1, 3, 5, 7, 9, 11, 13, 15, 17, 19, 21, 23, 25, 27, 29, 45, 47, 50, 48, 52, 54, 56, 58, 60, 62, 64, 66, 68, 70, 72, 74, 84, 85, 86, 88, 95, and/or 99. The detecting can be carried out by any effective method, e.g., obtaining cells from a subject, determining the gene sequence or structure of a target gene (using, e.g., mRNA, cDNA, genomic DNA, etc), comparing the sequence or structure of the target gene to the structure of the normal gene, whereby a difference in sequence or structure indicates a mutation in the gene in the subject. Polynucleotides can also be used to test for mutations, SNPs, polymorphisms, etc., e.g., using mismatch DNA repair technology as described in U.S. Pat. No. 5,683,877; U.S. Pat. No. 5,656,430; Wu et al., Proc. Natl. Acad. Sci., 89:8779-8783, 1992.

[0118] The present invention also relates to methods of detecting polymorphisms in differentially regulated cancer genes, comprising, e.g., comparing the structure of: genomic DNA comprising all or part of a differentially regulated cancer gene, mRNA comprising all or part of a differentially regulated cancer gene, cDNA comprising all or part of a differentially regulated cancer gene, or a polypeptide comprising all or part of differentially regulated cancer gene, with the structure of a differentially regulated cancer gene,e.g., as set forth in SEQ ID NOS 1, 3, 5, 7, 9, 11, 13, 15, 17, 19, 21, 23, 25, 27, 29, 45, 47, 50, 48, 52, 54, 56, 58, 60, 62, 64, 66, 68, 70, 72, 74, 84, 85, 86, 88, 95, and/or 99. The methods can be carried out on a sample from any source, e.g., cells, tissues, body fluids, blood, urine, stool, hair, egg, sperm, cerebral spinal fluid, etc.

[0119] These methods can be implemented in many different ways. For example, “comparing the structure” steps include, but are not limited to, comparing restriction maps, nucleotide sequences, amino acid sequences, RFLPs, DNAase sites, DNA methylation fingerprints (e.g., U.S. Pat. No. 6,214,556), protein cleavage sites, molecular weights, electrophoretic mobilities, charges, ion mobility, etc., between a standard differentially regulated cancer genes and a test differentially regulated cancer genes. The term “structure” can refer to any physical characteristics or configurations which can be used to distinguish between nucleic acids and polypeptides. The methods and instruments used to accomplish the comparing step depends upon the physical characteristics which are to be compared. Thus, various techniques are contemplated, including, e.g., sequencing machines (both amino acid and polynucleotide), electrophoresis, mass spectrometer (U.S. Pat. Nos. 6,093,541, 6,002,127), liquid chromatography, HPLC, etc.

[0120] To carry out such methods, “all or part” of the gene or polypeptide can be compared. For example, if nucleotide sequencing is utilized, the entire gene can be sequenced, including promoter, introns, and exons, or only parts of it can be sequenced and compared, e.g., exon 1, exon 2, etc.

Mutagenesis

[0121] Mutated polynucleotide sequences of the present invention are useful for various purposes, e.g., to create mutations of the polypeptides they encode, to identify functional regions of genomic DNA, to produce probes for screening libraries, etc. Mutagenesis can be carried out routinely according to any effective method, e.g., oligonucleotide-directed (Smith, M., Ann. Rev. Genet. 19:423-463, 1985), degenerate oligonucleotiddirected (Hill et al., Method Enzymology, 155:558-568, 1987), region-specific (Myers et al., Science, 229:242-246, 1985; Derbyshire et al., Gene, 46:145, 1986; Ner et al., DNA, 7:127, 1988), inker-scanning (McKnight and Kingsbury, Science, 217:316-324, 1982), directed using PCR, recursive ensemble mutagenesis (Arkin and Yourvan, Proc. Natl. Acad. Sci., 89:7811-7815, 1992), random mutagenesis (e.g., U.S. Pat. Nos. 5,096,815; 5,198,346; and 5,223,409), site-directed mutagenesis (e.g., Walder et al., Gene, 42:133, 1986; Bauer et al., Gene, 37:73, 1985; Craik, Bio Techniques, January 1985, 12-19; Smith et al., Genetic Engineering: Principles and Methods, Plenum Press, 1981), phage display (e.g., Lowman et al., Biochem. 30:10832-10837, 1991; Ladner et al., U.S. Pat. No. 5,223,409; Huse, WIPO Publication WO 92/06204), etc. Desired sequences can also be produced by the assembly of target sequences using mutually priming oligonucleotides (Uhllmann, Gene, 71:2940, 1988). For directed mutagenesis methods, analysis of the three-dimensional structure of the differentially regulated cancer genes polypeptide can be used to guide and facilitate making mutants which effect polypeptide activity. Sites of substrate-enzyme interaction or other biological activities can also be determined by analysis of crystal structure as determined by such techniques as nuclear magnetic resonance, crystallography or photoaffinity labeling. See, for example, de Vos et al., Science 255:306-312, 1992; Smith et al., J. Mol. Biol. 224:899-904, 1992; Wlodaver et al., FEBS Lett. 309:59-64, 1992.

[0122] In addition, libraries of differentially regulated cancer genes and fragments thereof can be used for screening and selection of differentially regulated cancer genes variants. For instance, a library of coding sequences can be generated by treating a double-stranded DNA with a nuclease under conditions where the nicking occurs, e.g., only once per molecule, denaturing the double-stranded DNA, renaturing it to for double-stranded DNA that can include sense/antisense pairs from different nicked products, removing single-stranded portions from reformed duplexes by treatment with S1 nuclease, and ligating the resulting DNAs into an expression vector. By this method, expression libraries can be made comprising “mutagenized” differentially regulated cancer genes. The entire coding sequence or parts thereof can be used.

Polynucleotide Expression, Polypeptides Produced thereby, and Specific-Binding Partners Thereto.

[0123] A polynucleotide according to the present invention can be expressed in a variety of different systems, in vitro and in vivo, according to the desired purpose. For example, a polynucleotide can be inserted into an expression vector, introduced into a desired host, and cultured under conditions effective to achieve expression of a polypeptide coded for by the polynucleotide, to search for specific binding partners. Effective conditions include any culture conditions which are suitable for achieving production of the polypeptide by the host cell, including effective temperatures, pH, medium, additives to the media in which the host cell is cultured (e.g., additives which amplify or induce expression such as butyrate, or methotrexate if the coding polynucleotide is adjacent to a dhfr gene), cycloheximide, cell densities, culture dishes, etc. A polynucleotide can be introduced into the cell by any effective method including, e.g., naked DNA, calcium phosphate precipitation, electroporation, injection, DEAE-Dextran mediated transfection, fusion with liposomes, association with agents which enhance its uptake into cells, viral transfection. A cell into which a polynucleotide of the present invention has been introduced is a transformed host cell. The polynucleotide can be extrachromosomal or integrated into a chromosome(s) of the host cell. It can be stable or transient. An expression vector is selected for its compatibility with the host cell. Host cells include, mammalian cells, e.g., COS, CV1, BHK, CHO, Hela, LIX, NIH 3T3,

[0124] PC-3 (CRL-1435), LNCaP (CRL-1740), CA-HPV-10 (CRL-2220), PZ-HPV-7 (CRL-2221), MDA-PCa 2b (CRL-2422), 22Rv1 (CRL2505), NCI-H660 (CRL-5813), HS 804.Sk (CRL-7535), LNCaP-FGF (CRL-10995), RWPE-1 (CRL,11609), RWPE-2 (CRI11610), PWR-1E (CRL 11611), rat MAT-Ly-LuB-2 (CRL-2376), and other primary and established prostate and prostate cancer cell lines, ZR-75-1 (ATCC CRL-1500), ZR-75-30 (ATCC CRL-1504), UACC-812 (ATCC CRL,1897), UACC-893 (ATCC CRL-1902), HCC38 (ATCC CRL-2314), HCC70 (CRL-2315), and other HCC cell lines (e.g., as deposited with the ATCC), AU565 (ATCC CRL-2351), Hs 496.T (ATCC CRL-7303), Hs 748.T (ATCC CRL-7486), SW527 (ATCC CRL-7940), 184A1 (ATCC CRL-8798), MCF cell lines (e.g., 10A and others deposited with the ATCC), MDA-MB-134-VI (ATCC HTB-23 and other MDA cell lines), SK-BR-3 (ATCC HTB-30), ME-180 (ATCC HTB-33), Hs 578Bst (ATCC HTB-125), Hs 578T (ATCC HTB-126), T-47D (ATCC HTB-133), and other primary and established breast and breast cancer cell lines, insect cells, such as 59 (S. frugipeda) and Drosophila, bacteria, such as E. coli, Streptococcus, bacillus, yeast, such as Sacharomyces, S. cerevisiae, fungal cells, plant cells, embryonic or adult stem cells (e.g., mammalian, such as mouse or human).

[0125] Expression control sequences are similarly selected for host compatibility and a desired purpose, e.g., high copy number, high amounts, induction, amplification, controlled expression. Other sequences which can be employed include enhancers such as from SV40, CMV, RSV, inducible promoters, cell-type'specific elements, or sequences which allow selective or specific cell expression. Promoters that can be used to drive its expression, include, e.g., the endogenous promoter, MMTV, SV40, trp, lac, tac, or T7 promoters for bacterial hosts; or alpha factor, alcohol oxidase, or PGH promoters for yeast. RNA promoters can be used to produced RNA transcripts, such as T7 or SP6. See, e.g., Melton et al., Polynucleotide Res., 12(18):7035-7056, 1984; Dunn and Studier. J. Mol. Bio., 166:477-435, 1984; U.S. Pat. No. 5,891,636; Studier et al., Gene Epression Technology, Methods in Enzymology, 85:60-89, 1987. In addition, as discussed above, translational signals (including in-frame insertions) can be included.

[0126] When a polynucleotide is expressed as a heterologous gene in a transfected cell line, the gene is introduced into a cell as described above, under effective conditions in which the gene is expressed. The term “heterologous” means that the gene has been introduced into the cell line by the “hand-of-man.” Introduction of a gene into a cell line is discussed above. The transfected (or transformed) cell expressing the gene can be lysed or the cell line can be used intact.

[0127] For expression and other purposes, a polynucleotide can contain codons found in a naturally-occurring gene, transcript, or cDNA, for example, e.g., as set forth in SEQ ID NOS 1, 3, 5, 7, 9, 11, 13, 15, 17, 19, 21, 23, 25, 27, 29, 45, 47, 50, 48, 52, 54, 56, 58, 60, 62, 64, 66, 68, 70, 72, 74, 84, 85, 86, 88, 95, and/or 99, or it can contain degenerate codons coding for the same amino acid sequences. For instance, it may be desirable to change the codors in the sequence to optimize the sequence for expression in a desired host. See, e.g., U.S. Pat. Nos. 5,567,600 and 5,567,862.

[0128] A polypeptide according to the present invention can be recovered from natural sources, transformed host cells (culture medium or cells) according to the usual methods, including, detergent extraction (e.g., non-ionic detergent, Triton X-100, CHAPS, octylglucoside, Igepal CA-630), ammonium sulfate or ethanol precipitation, acid extraction, anion or cation exchange chromatography, phosphocellulose chromatography, hydrophobic interaction chromatography, hydroxyapatite chromatography, lectin chromatography, gel electrophoresis. Protein refolding steps can be used, as necessary, in completing the configuration of the mature protein. Finally, high performance liquid chromatography (HPLC) can be employed for purification steps. Another approach is express the polypeptide recombinantly with an affinity tag (Flag epitope, HA epitope, myc epitope, 6× His, maltose binding protein, chitinase, etc) and then purify by anti-tag antibody-conjugated affinity chromatography.

[0129] The present invention also relates to polypeptides of differentially regulated cancer genes, e.g., an isolated human differentially regulated cancer gene polypeptide comprising or having the amino acid sequence set forth in SEQ D) NOS 1, 3, 5, 7, 9, 11, 13, 15, 17, 19, 21, 23, 25, 27, 29, 45, 47, 50, 48, 52, 54, 56, 58, 60, 62, 64, 66, 68, 70, 72, 74, 84, 85, 86, 88, 95, and/or 99, an isolated mammalian differentially regulated cancer genes polypeptide comprising an amino acid sequence, e.g., having at least 90%, 95%, 99%, or more amino acid sequence identity to the amino acid sequence set forth in SEQ ID NOS 2, 4, 6, 8, 10, 12, 14, 16, 18, 20, 22, 24, 26, 28, 30, 46, 51, 49, 53, 55, 57, 59, 61, 63, 65, 67, 69, 71, 73, 75, 87, 89, 96 and/or 100, and optionally having one or more of differentially regulated cancer genes activities. Fragments specific to differentially regulated cancer genes can also used, e.g., to produce antibodies or other immune responses, as competitors, etc. These fragments can be referred to as-being “specific for” a differentially regulated cancer gene. The latter phrase, as already defined, indicates that the peptides are characteristic of a particular genes, and that the defined sequences are substantially absent from all other protein types. Such polypeptides can be of any size which is necessary to confer specificity, e.g., 5, 8, 10, 12, 15, 20, etc.

[0130] The present invention also relates to specific-binding partners. These include antibodies which are specific for polypeptides encoded by polynucleotides of the present invention, as well as other binding-partners which interact with polynucleotides and polypeptides of the present invention. Protein-protein interactions between differentially regulated cancer genes and other polypeptides and binding partners can be identified using any suitable methods, e.g., protein binding assays (e.g., filtration assays, chromatography, etc.), yeast two-hybrid system (Fields and Song, Nature, 340: 245-247, 1989), protein arrays, gel-shift assays, FRET (fluorescence resonance energy transfer) assays, etc. Nucleic acid interactions (e.g., protein-DNA or protein-RNA) can be assessed using gel-shift assays, e.g., as carried out in U.S. Pat. Nos. 6,333,407 and 5,789,538.

[0131] Antibodies, e.g., polyclonal, monoclonal, recombinant, chimeric, humanized, single-chain, Fab, and fragments thereof, can be prepared according to any desired method. See, also, screening recombinant immunoglobulin libraries (e.g., Orlandi et al., Proc. Natl. Acad. Sci., 86:3833-3837, 1989; Huse et al., Science, 256:1275-1281, 1989); in vitro stimulation of lymphocyte populations; Winter and Milstein, Nature, 349: 293-299, 1991. The antibodies can be IgM, IgG, subtypes, IgG2a, IgG1, etc. Antibodies, and immune responses, can also be generated by administering naked DNA See, e.g., U.S. Pat Nos. 5,703,055; 5,589,466; 5,580,859. Antibodies can be used from any source, including, goat, rabbit, mouse, chicken (e.g., IgY; see, Duan, W0/029444 for methods of making antibodies in avian hosts, and harvesting the antibodies from the eggs). An antibody specific for a polypeptide means that the antibody recognizes a defined sequence of amino acids within or including the polypeptide. Other specific binding partners include, e.g., aptamers and PNA. Antibodies can be prepared against specific epitopes or domains of a differentially regulated cancer gene. Antibodies can also be humanized, e.g., where they are to be used therapeutically.

[0132] The term “antibody” as used herein includes intact molecules as well as fragments thereof, such as Fab, F(ab′)2, and Fv which are capable of binding to an epitopic determinant present in Bin1 polypeptide. Such antibody fragments retain some ability to selectively bind with its antigen or receptor. The term “epitope” refers to an antigenic determinant on an antigen to which the paratope of an antibody binds. Epitopic determinants usually consist of chemically active surface groupings of molecules such as amino acids or sugar side chains and usually have specific three dimensional structural characteristics, as well as specific charge characteristics. Antibodies can be prepared against specific epitopes or polypeptide domains.

[0133] Antibodies which bind to differentially regulated cancer genes polypeptides of the present invention can be prepared using an intact polypeptide or fragments containing small peptides of interest as the immunizing antigen. For example, it may be desirable to produce antibodies that specifically bind to the N- or C-terminal domains of differentially regulated cancer genes. The polypeptide or peptide used to immunize an animal which is derived from translated cDNA or chemically synthesized which can be conjugated to a carrier protein, if desired. Such commonly used carriers which are chemically coupled to the immunizing peptide include keyhole limpet hemocyanin (KLH), thyroglobulin, bovine serum albumin (BSA), and tetanus toxoid.

Methods of Detecting Polypeptides

[0134] Polypeptides coded for by differentially regulated cancer genes of the present invention can be detected, visualized, determined, quantitated, etc. according to any effective method, useful methods include, e.g., but are not limited to, immunoassays, RIA (radioimmunassay), ELISA, (enzyme-linked-immunosorbent assay), inumunoflourescence, flow, cytometry, histology, electron microscopy, light microscopy, in situ assays, immunoprecipitation, Western blot, etc.

[0135] Inmunoassays may be carried in liquid or on biological support. For instance, a sample (e.g., blood, stool, urine, cells, tissue,cerebral spinal fluid, body fluids, etc.) can be brought in contact with and immobilized onto a solid phase support or carrier such as nitrocellulose, or other solid support that is capable of immobilizing cells, cell particles or soluble proteins. The support may then be washed with suitable buffers followed by treatment with the detectably labeled differentially regulated cancer genes specific antibody. The solid phase support can then be washed with a buffer a second time to remove unbound antibody. The amount of bound label on solid support may then be detected by conventional means.

[0136] A “solid phase support or carrier” includes any support capable of binding an antigen, antibody, or other specific binding partner. Supports or carriers include glass, polystyrene, polypropylene, polyethylene, dextran, nylon, amylases, natural and modified celluloses, polyacrylamides, and magnetite. A support material can have any structural or physical configuration Thus, the support configuration may be spherical, as in a bead, or cylindrical, as in the inside surface of a test tube, or the external surface of a rod. Alternatively, the surface may-be flat such as a sheet, test strip, etc.

[0137] One of the many ways in which gene peptide-specific antibody can be detectably labeled is by linking it to an enzyme and using it in an enzyme immunoassay (EIA). See, e.g., Voller, A., “The Enzyme Linked Immunosorbent Assay (ELISA),” 1978, Diagnostic Horizons 2, 1-7, Microbiological Associates Quarterly Publication, Walkersville, Md.); Voller, A. et al., 1978, J. Clin. Pathol. 31, 507-520; Butler, J. E., 1981, Meth. Enzymol. 73, 482-523; Maggio, E. (ed.), 1980, Enzyme Immunoassay, CRC Press, Boca Raton, Fla. The enzyme which is bound to the antibody will react with an appropriate substrate, preferably a chromogenic substrate, in such a manner as to produce a chemical moiety that can be detected, for example, by spectrophotometric, fluorimetric or by visual means. Enzymes that can be used to detectably label the antibody include, but are not limited to, malate dehydrogenase, staphylococcal nuclease, delta-5-steroid isomerase, yeast alcohol dehydrogenase, .alpha.-glycerophosphate, dehydrogenase, triose phosphate isomerase, horseradish peroxidase, alkaline phosphatase, asparaginase, glucose oxidase, beta.-galactosidase, ribonuclease, urease, catalase, glucose-6-phosphate dehydrogenase, glucoamylase and acetylcholinesterase. The detection can be accomplished by colorimetric methods that employ a chromogenic substrate for the enzyme. Detection may also be accomplished by visual comparison of the extent of enzymatic reaction of a substrate in comparison with similarly prepared standards.

[0138] Detection may also be accomplished using any of a variety of other immunoassays. For example, by radioactively labeling the antibodies or antibody fragments, it is possible to detect differentially regulated cancer genes peptides through the use of a radioimmunoassay (RIA). See, e.g., Weintraub, B., Principles of Radioimmunoassays, Seventh Training Course on Radioligand Assay Techniques, The Endocrine Society, March, 1986. The radioactive isotope can be detected by such means as the use of a gamma counter or a scintillation counter or by autoradiography.

[0139] It is also possible to label the antibody with a fluorescent compound. When the fluorescently labeled antibody is exposed to light of the proper wave length, its presence can then be detected due to fluorescence. Among the most commonly used fluorescent labeling compounds are fluorescein isothiocyanate, rhodamine, phycoein, phycocyanin, allophycocyanin, o-phthaldehyde and fluorescamme. The antibody can also be detectably labeled using fluorescence emitting metals such as those in the lanthanide series. These metals can be attached to the antibody using such metal chelating groups as diethylenetriaminepentacetic acid (DTPA) or ethylenediaminetetraacetic acid (EDTA).

[0140] The antibody also can be detectably labeled by coupling it to a chemiluminescent compound. The presence of the chemiluminescent-tagged antibody is then determined by detecting the presence of luminescence that arises during the course of a chemical reaction. Examples of useful chemiluminescent labeling compounds are luminol, isoluminol, theromatic acridinium ester, imidazole, acridinium salt and oxalate ester.

[0141] Likewise, a bioluminescent compound may be used to label the antibody of the present invention. Bioluminescence is a type of chemiluminescence found in biological systems in which a catalytic protein increases the efficiency of the chemiluminescent reaction. The presence of a bioluminescent protein is determined by detecting the presence of luminescence. Important bioluminescent compounds for purposes of labeling are luciferin, luciferase and aequorin.

Diagnostic

[0142] The present invention also relates to methods and compositions for diagnosing prostate or breast cancer, or determining susceptibility to said cancer, using polynucleotides, polypeptides, and specific-binding partners of the present invention to detect, assess, determine, etc., the expression of differentially regulated cancer genes and their polypeptide products. In such methods, the gene can serve as a marker for the disorder, e.g., where the gene, when mutant, is a direct cause of the disorder; where the gene is affected by another gene(s) which is directly responsible for the disorder, e.g., when the gene is part of the same signaling pathway as the directly responsible gene; and, where the gene is chromosomally linked to the gene(s) directly responsible for the disorder, and segregates with it. Many other situations are possible. To detect, assess, determine, etc., a probe specific for the gene can be employed as described above and below. Any method of detecting and/or assessing the gene can be used, including detecting expression of the gene using polynucleotides, antibodies, or other specific-binding partners.

[0143] The present invention relates to methods of diagnosing a cancer associated with a differentially regulated cancer gene of the present invention, or determining a subject's susceptibility to such cancer, comprising, e.g., assessing the expression of a gene of the present invention in a tissue sample comprising tissue or cells suspected of having cancer. The phrase “diagnosing” indicates that it is determined whether the sample has the disorder. A “disorder” means, e.g., any abnormal condition as in a disease or malady. “Determining a subject's susceptibility to a disease or disorder” indicates that the subject is assessed for whether s/he is predisposed to get such a disease or disorder, where the predisposition is indicated by abnormal expression of the gene (e.g., gene mutation, gene expression pattern is not normal, etc.). Predisposition or susceptibility to a disease may result when a such disease is influenced by epigenetic, environmental, etc., factors. Diagnosing includes prenatal screening where samples from the fetus or embryo (e.g., via amniocentesis or CV sampling) are analyzed for the expression of the gene.

[0144] By the phrase “assessing expression of a differentially regulated gene,” it is meant that the functional status of the gene is evaluated. This includes, but is not limited to, measuring expression levels of said gene, determining the genomic structure of said gene, determining the mRNA structure of transcripts from said gene, or measuring the expression levels of polypeptide coded for by said gene. Thus, the term “assessing expression” includes evaluating the all aspects of the transcriptional and translational machinery of the gene. For instance, if a promoter defect causes, or is suspected of causing, the disorder, then a sample can be evaluated (i.e., “assessed”) by looking (e.g., sequencing or restriction mapping) at the promoter sequence in the gene, by detecting transcription products (e.g., RNA), by detecting translation product (e.g., polypeptide). Any measure of whether the gene is functional can be used, including, polypeptide, polynucleotide, and functional assays for the gene's biological activity.

[0145] In making the assessment, it can be useful to compare the results to a normal gene, e.g., a gene which is not associated with the disorder. The nature of the comparison can be determined routinely, depending upon how the assessing is accomplished. If, for example, the mRNA levels of a sample is detected, then the mRNA levels of a normal can serve as a comparison, or a gene which is known not to be affected by the disorder. Methods of detecting mRNA are well known, and discussed above, e.g., but not limited to, Northern blot analysis, polymerase chain reaction (PCR), reverse transcriptase PCR, RACE PCR, etc. Similarly, if polypeptide production is used to evaluate the gene, then the polypeptide in a normal tissue sample can be used as a comparison, or, polypeptide from a different gene whose expression is known not to be affected by the disorder. These are only examples of how such a method could be carried out.

[0146] The genes and polypeptides of the present invention can be used to identify, detect, stage, determine the presence of, prognosticate, treat, study, etc., breast, prostate, and other cancer. The present invention relates to methods of identifying a genetic basis for a disease or disease-susceptibility, comprising, e.g., determining the association of a cancer or cancer susceptibility with a gene of the present invention. An association between a disease or disease-susceptibility and nucleotide sequence includes, e.g., establishing (or finding) a correlation (or relationship) between a DNA marker (e.g., gene, VNTR, polymorphism, EST, etc.) and a particular disease state. Once a relationship is identified, the DNA marker can be utilized in diagnostic tests and as a drug target. Any region of the gene can be used as a source of the DNA marker, exons, introns, intergenic regions, etc.

[0147] Human linkage maps can be constructed to establish a relationship between a gene and cancer. Typically, polymorphic molecular markers (e.g., STRP's, SNP's, RFLP's, VNmR's) are identified within the region, linkage and map distance between the markers is then established, and then linkage is established between phenotype and the various individual molecular markers. Maps can be produced for an individual family, selected populations, patient populations, etc. In general, these methods involve identifying a marker associated with the disease (e.g., identifying a polymorphism in a family which is linked to the disease) and then analyzing the surrounding DNA to identity the gene responsible for the phenotype. See, e.g., Kruglyak et al., Am. J. Hum. Genet., 58, 1347-1363, 1996; Matise et al., Nat. Genet., 6(4):384-90, 1994.

[0148] Assessing the effects of therapeutic and preventative interventions (e.g., administration of a drug, chemotherapy, radiation, etc.) on cancer is a major effort in drug discovery, clinical medicine, and pharmacogenomics. The evaluation of therapeutic and preventative measures, whether experimental or already in clinical use, has broad applicability, e.g., in clinical trials, for monitoring the status of a patient, for analyzing and assessing animal models, and in any scenario involving disease treatment and prevention. Analyzing the expression profiles of polynucleotides of the present invention can be utilized as a parameter by which interventions are judged and measured. Treatment of a disorder can change the expression profile in some manner which is prognostic or indicative of the drug's effect on it. Changes in the profile can indicate, e.g., drug toxicity, return to a normal level, etc. Accordingly, the present invention also relates to methods of monitoring or assessing a therapeutic or preventative measure (e.g., chemotherapy, radiation, anti-neoplastic drugs, antibodies, etc.) in a subject having a cancer, or, susceptible to cancer, comprising, e.g., detecting the expression levels of differentially regulated cancer genes. A subject can be a cell-based assay system, non-human animal model, human patient, etc. Detecting can be accomplished as described for the methods above and below. By “therapeutic or preventative intervention,” it is meant, e.g., a drug administered to a patient, surgery, radiation, chemotherapy, and other measures taken to prevent, treat, or diagnose a disorder.

[0149] The present invention also relates to methods of using differentially regulated cancer genes binding partners, such as antibodies, to deliver active agents to the cancer for a variety of different purposes, including, e.g., for diagnostic, therapeutic (e.g., to treat cancer), and research purposes. Methods can involve delivering or administering an active agent to the cancer, comprising, e.g., administering to a subject in need thereof, an effective amount of an active agent coupled to a binding partner specific for human differentially regulated cancer genes polypeptide, wherein said binding partner is effective to deliver said active agent specifically to said cancer.

[0150] Any type of active agent can be used in combination with a binding partner, including, therapeutic, cytotoxic, cytostatic, chemotherapeutic, anti-neoplastic, anti-proliferative, anti-biotic, etc., agents. A chemotherapeutic agent can be, e.g., DNA-interactive agent, alkylating agent, antimetabolite, tubulin-interactive agent, hormonal agent, hydroxyurea, Cisplatin, Cyclophosphamide, Altretamine, Bleomycin, Dactinomycin, Doxorubicin, Etoposide, Teniposide, paclitaxel, cytoxan, 2-methoxy-carbonyl-amino-benzimidazole, Plicamycin, Methotrexate, Fluorouracil, Fluorodeoxyrridin, CB3717, Azacitidine, Floxuridine, Mercapyopurine, 6-Thioguanine, Pentostatin, Cytarabine, Fludarabine, etc. Agents can also be contrast agents useful in imaging technology, e.g., X-ray, CT, CAT, MRI ultrasound, PET, SPECT, and scintographic.

[0151] An active agent can be associated in any manner with a differentially regulated cancer genes binding partner which is effective to achieve its delivery specifically to the target. Specific delivery or targeting indicates that the agent is provided to the cancer, without being substantially provided to other tissues. This is useful especially where an agent is toxic, and specific targeting to the cancer enables the majority of the toxicity to be aimed it, with as small as possible effect on other tissues in the body. The association of the active agent and the binding partner (“coupling”) can be direct, e.g., through chemical bonds between the binding partner and the agent, or, via a linidng agent, or the association can be less direct, e.g., where the active agent is in a liposome, or other carrier, and the binding partner is associated with the liposome surface. In such case, the binding partner can be oriented in such a way that it is able to bind to differentially regulated cancer gene product, e.g., on the cell surface. Methods for delivery of DNA via a cell-surface receptor is described, e.g., in U.S. Pat No. 6,339,139.

Identifying Agent Methods

[0152] The present invention also relates to methods of identifying agents, and the agents themselves, which modulate a differentially regulated cancer gene. These agents can be used to modulate the biological activity of the polypeptide encoded for the gene, or the gene, itself. Agents which regulate the gene or its product are useful in variety of different environments, including as medicinal agents to treat or prevent disorders associated with differentially regulated cancer genes and as research reagents to modify the fumction of tissues and cell.

[0153] Methods of identifying agents generally comprise steps in which an agent is placed in contact with the gene, its transcription product, its translation product, or other target, and then a determination is performed to assess whether the agent “modulates” the target. The specific method utilized will depend upon a number of factors, including, e.g., the target (i.e., is it the gene or polypeptide encoded by it), the environment (e.g., in vitro or in vivo), the composition of the agent, etc.

[0154] For modulating the expression of a differentially regulated cancer gene, a method can comprise, in any effective order, one or more of the following steps, e.g., contacting a differentially regulated cancer gene (e.g., in a cell population) with a test agent under conditions effective for said test agent to modulate the expression of said differentially regulated cancer gene, and determining whether said test agent modulates said differentially regulated cancer gene. An agent can modulate expression of differentially regulated cancer gene at any level, including transcription (e.g., by modulating the promoter), translation, and/or perdurance of the nucleic acid (e.g., degradation, stability, etc.) in the cell.

[0155] For modulating the biological activity of differentially regulated cancer gene product, such as a polypeptides, a method can comprise, in any effective order, one or more of the following steps, e.g., contacting a differentially regulated cancer gene polypeptide (e.g., in a cell, lysate, or isolated) with a test agent under conditions effective for said test agent to modulate the biological activity of said polypeptide, and determining whether said test agent modulates said biological activity.

[0156] Contacting a differentially regulated cancer gene with the test agent can be accomplished by any suitable method and/or means that places the agent in a position to functionally control expression or biological activity of the gene present in the sample. Functional control indicates that the agent can exert its physiological effect on differentially regulated cancer genes through whatever mechanism it works. The choice of the method and/or means can depend upon the nature of the agent and the condition and type of environment in which the differentially regulated cancer genes is presented, e.g., lysate, isolated, or in a cell population (such as, in vivo, in vitro, organ explants, etc.). For instance, if the cell population is an in vitro cell culture, the agent can be contacted with the cells by adding it directly into the culture medium. If the agent cannot dissolve readily in an aqueous medium, it can be incorporated into liposomes, or another lipophilic carrier, and then administered to the cell culture. Contact can also be facilitated by incorporation of agent with carriers and delivery molecules and complexes, by injection, by infusion, etc.

[0157] Agents can be directed to, or targeted to, any part of the polypeptide which is effective for modulating it. For example, agents, such as antibodies and small molecules, can be targeted to cell-surface, exposed, extracellular, ligand binding, functional, etc., domains of the polypeptide. Agents can also be directed to intracellular regions and domains, e.g., regions where the polypeptide couples or interacts with intracellular or intramembrane binding partners.

[0158] After the agent has been administered in such a way that it can gain access to differentially regulated cancer genes, it can be determined whether the test agent modulates differentially regulated cancer genes expression or biological activity. Modulation can be of any type, quality, or quantity, e.g., increase, facilitate, enhance, up-regulate, stimulate, activate, amplify, augment, induce, decrease, down-regulate, diminish, lessen, reduce, etc. The modulatory quantity can also encompass any value, e.g., 1%, 5%, 10%, 50%, 75%, 1-fold, 2-fold, 5-fold, 1 0-fold, 100-fold, etc. To modulate differentially regulated cancer genes expression means, e.g., that the test agent has an effect on its expression, e.g., to effect the amount of transcription, to effect RNA splicing, to effect translation of the RNA into polypeptide, to effect RNA or polypeptide stability, to effect polyadenylation or other processing of the RNA, to effect post-transcriptional or post-translational processing, etc. To modulate biological activity means, e.g., that a functional activity of the polypeptide is changed in comparison to its normal activity in the absence of the agent This effect includes, increase, decrease, block inhibit, enhance, etc A test agent can be of any molecular composition, e.g., chemical compounds, biomolecules, such as polypeptides, lipids, nucleic acids, carbohydrates, antibodies, ribozymes, double-stranded RNA, aptamers, etc. For example, if a polypeptide to be modulated is a cell-surface molecule, a test agent can be an antibody that specifically recognizes it and, e.g., causes the polypeptide to be internalized, leading-to its down regulation on the surface of the cell. Such an effect does not have to be permanent, but can require the presence of the antibody to continue the down-regulatory effect. Antibodies can also be used to modulate the biological activity of a polypeptide in a lysate or other cell-free form.

Therapeutics

[0159] Selective polynucleotides, polypeptides, and specific-binding partners thereto, can be utilized in therapeutic applications, especially to treat prostate and breast cancers. Useful methods include, but are not limited to, immunotherapy (e.g., using specific-binding partners to polypeptides), vaccination (e.g., using a selective polypeptide or a naked DNA encoding such polypeptide), protein or polypeptide replacement therapy, gene therapy (e.g., germ-line correction, antisense), etc.

[0160] Various immunotherapeutic approaches can be used. For instance, unlabeled antibody that specifically recognizes a tissue-specific antigen can be used to stimulate the body to destroy or attack a cancer or other diseased tissue, to cause down-regulation, to produce complement-mediated lysis, to inhibit cell growth, etc., of target cells which display the antigen, e.g., analogously to how c-erbB-2 antibodies are used to treat breast cancer. In addition, antibody can be labeled or conjugated to enhance its deleterious effect, e.g., with radionuclides and other energy emitting entitities, toxins, such as ricin, exotoxin A (ETA), and diphtheria, cytotoxic or cytostatic agents, immunomodulators, chemotherapeutic agents, etc. See, e.g., U.S. Pat. No. 6,107,090.

[0161] An antibody or other specific-binding partner can be conjugated to a second molecule, such as a cytotoxic agent, and used for targeting the second molecule to a tissue-antigen positive cell (Vitetta, E. S. et al., 1993, Immunotoxin therapy, in DeVita, Jr., V. T. et al., eds, Cancer: Principles and Practice of Oncology, 4th ed., J. B. Lippincott Co., Philadelphia, 2624-2636). Examples of cytotoxic agents include, but are not limited to, antimetabolites, alkylating agents, anthracyclines, antibiotics, anti-mitotic agents, radioisotopes and chemotherapeutic agents. Further examples of cytotoxic agents include, but are not limited to ricin, doxorubicin, daunorubicin, taxol, ethidium bromide, mitomycin, etoposide, tenoposide, vincristine, vinblastine, colchicine, dihydroxy anthracin dione, actinomycin D, 1-dehydrotestosterone, diptheria toxin, Pseudomonas exotoxin (PE) A, PE40, abrin, elongation factor-2 and glucocorticoid. Techniques for conjugating therapeutic agents to antibodies are well.

[0162] In addition to immunotherapy, polynucleotides and polypeptides can be used as targets for non-immunotherapeutic applications, e.g., using compounds which interfere with function, expression (e.g., antisense as a therapeutic agent), assembly, etc. RNA interference can be used in vitro and in vivo to silence differentially regulated cancer genes when its expression contributes to a disease (but also for other purposes, e.g., to identify the gene's function to change a developmental pathway of a cell, etc.). See, e.g., Sharp and Zamore, Science, 287:2431-2433, 2001; Grishok et al., Science, 287:2494, 2001.

[0163] Delivery of therapeutic agents can be achieved according to any effective method, including, liposomes, viruses, plasmid vectors, bacterial delivery systems, orally, systemically, etc. Therapeutic agents of the present invention can be admnistered in any form by any effective route, including, e.g., oral, parenteral, enteral, intraperitoneal, topical, transdermal (e.g., using any standard patch), intravenously, ophthalmic, nasally, local, non-oral, such as aerosal, inhalation, subcutaneous, intramuscular, buccal, sublingual, rectal, vaginal, intra-arterial, and intrathecal, etc. They can be administered alone, or in combination with any ingredient(s), active or inactive.

[0164] In addition to therapeutics, per se, the present invention also relates to methods of treating a cancer showing altered expression of differentially regulated cancer genes, comprising, e.g., administering to a subject in need thereof a therapeutic agent which is effective for regulating expression of said differentially regulated cancer genes and/or which is effective in treating said disease. The term treating” is used conventionally, e.g., the management or care of a subject for the purpose of combating, alleviating, reducing, relieving, improving the cancer. By the phrase “altered expression,” it is meant that the disease is associated with a mutation in the gene, or any modification to the gene (or corresponding product) which affects its normal function. Thus, expression of a differentially regulated cancer gene refers to, e.g., transcription, translation, splicing, stability of the mRNA or protein product, activity of the gene product, differential expression, etc.

[0165] Any agent which “treats” the disease can be used. Such an agent can be one which regulates the expression of the differentially regulated cancer genes. Expression refers to the same acts already mentioned, e.g. transcription, translation, splicing, stability of the mRNA or protein product, activity of the gene product, differential expression, etc. For instance, if the condition was a result of a complete deficiency of the gene product, administration of gene product to a patient would be said to treat the disease and regulate the gene's expression. Many other possible situations are possible, e.g., where the gene is aberrantly expressed, and the therapeutic agent regulates the aberrant expression by restoring its normal expression pattern.

Arrays

[0166] The present invention also relates to an ordered array of polynucleotide probes and specific-binding partners (e.g., antibodies) for detecting the expression of differentially regulated cancer genes in a sample, comprising, one or more polynucleotide probes or specific binding partners associated with a solid support or in separate receptacles, wherein each probe is specific for differentially regulated cancer genes, and the probes comprise a nucleotide sequence of SEQ ID NOS 1, 3, 5, 7, 9, 11, 13, 15, 17, 19, 21, 23, 25, 27, 29, 45, 47, 50, 48, 52, 54, 56, 58, 60, 62, 64, 66, 68, 70, 72, 74, 84, 85, 86, 88, 95, and/or 99 which is specific for said gene, a nucleotide sequence having sequence identity to SEQ ID NOS 1, 3, 5, 7, 9, 11, 13, 15, 17, 19, 21, 23, 25, 27, 29, 45, 47, 50, 48, 52, 54, 56, 58, 60, 62, 64, 66, 68, 70, 72, 74, 84, 85, 86, 88, 95, and/or 99 which is specific for said gene or polynucleotide, or complements thereto, or a specific-binding partner which is specific for differentially regulated cancer genes.

[0167] The phrase “ordered array” indicates that the probes are arranged in an identifiable or position-addressable pattern, e.g., such as the arrays disclosed in U.S. Pat. Nos. 6,156,501, 6,077,673, 6,054,270, 5,723,320, 5,700,637, WO09919711, WO00023803. The probes are associated with the solid support in any effective way. For instance, the probes can be bound to the solid support, either by polymerizing the probes on the substrate, or by attaching a probe to the substrate. Association can be, covalent, electrostatic, noncovalent, hydrophobic, hydrophilic, noncovalent, coordination, adsorbed, absorbed, polar, etc. When fibers or hollow filaments are utilized for the array, the probes can fill the hollow orifice, be absorbed into the solid filament, be attached to the surface of the orifice, etc. Probes can be of any effective size, sequence identity, composition, etc., as already discussed.

Transgenic Animals

[0168] The present invention also relates to transgenic animals comprising differentially regulated cancer genes genes, and homologs thereof (Methods of maling transgenic animals, and associated recombinant technology, can be accomplished conventionally, e.g., as described in Transgenic Animal Technology, Pinkert et al., 2^{nd} Edition, Academic Press, 2002.) Such genes, as discussed in more detail below, include, but are not limited to, functionally-disrupted genes, mutated genes, ectopically or selectively-expressed genes, inducible or regulatable genes, etc. These transgenic animals can be produced according to any suitable technique or method, including homologous recombination, mutagenesis (e.g., ENU, Rathkolb et al., Exp. Physiol., 85(6):635-644, 2000), and the tetracycline-regulated gene expression system (e.g., U.S. Pat No. 6,242,667). The term “gene” as used herein includes any part of a gene, i.e., regulatory sequences, promoters, enhancers, exons, introns, coding sequences, etc. The differentially regulated cancer genes nucleic acid present in the construct or transgene can be naturally-occurring wild-type, polymorphic, or mutated. Where the animal is a non-human animal, its homolog can be used instead. Transgenic animals can be susceptible to cancer, e.g., prostate or breast cancer.

[0169] Along these lines, polynucleotides of the present invention can be used to create transgenic animals, e.g. a non-human animal, comprising at least one cell whose genome comprises a functional disruption of a differentially regulated cancer gene, or a homolog thereof (e.g., a mouse homolog when a mouse is used). By the phrases “functional disruption” or “functionally disrupted,” it is meant that the gene does not express a biologically-active product. It can be substantially deficient in at least one functional activity coded for by the gene. Expression of a polypeptide can be substantially absent, i.e., essentially undetectable amounts are made. However, polypeptide can also be made, but which is deficient in activity, e.g., where only an amino-terminal portion of the gene product is produced.

[0170] The transgenic animal can comprise one or more cells. When substantially all its cells contain the engineered gene, it can be referred to as a transgenic animal “whose genome comprises” the engineered gene. This indicates that the endogenous gene loci of the animal has been modified and substantially all cells contain such modification.

[0171] Functional disruption of the gene can be accomplished in any effective way, including, e.g., introduction of a stop codon into any part of the coding sequence such that the resulting polypeptide is biologically inactive (e.g., because it lacks a catalytic domain, a ligand binding domain, etc.), introduction of a mutation into a promoter or other regulatory sequence that is effective to turn it off, or reduce transcription of the gene, insertion of an exogenous sequence into the gene which inactivates it (e.g., which disrupts the production of a biologically-active polypeptide or which disrupts the promoter or other transcriptional machinery), deletion of sequences from the differentially regulated cancer genes gene (or homolog thereof), etc. Examples of transgenic animals having functionally disrupted genes are well known, e.g., as described in U.S. Pat. Nos. 6,239,326, 6,225,525, 6,207,878, 6,194,633, 6,187,992, 6,180,849, 6,177,610, 6,100,445, 6,087,555, 6,080,910, 6,069,297, 6,060,642, 6,028,244, 6,013,858, 5,981,830, 5,866,760, 5,859,314, 5,850,004, 5,817,912, 5,789,654, 5,777,195, and 5,569,824. A transgenic animal which comprises the functional disruption can also be referred to as a “knock-out” animal, since the biological activity of its differentially regulated cancer genes genes has been “knocked-out” Knock-outs can be homozygous or heterozygous.

[0172] For creating functionally disrupted genes, and other gene mutations, homologous recombination technology is of special interest since it allows specific regions of the genome to be targeted. Using homologous recombination methods, genes can be specifically-inactivated, specific mutations can be introduced, and exogenous sequences can be introduced at specific sites. These methods are well known in the art, e.g., as described in the patents above. See, also, Robertson, Biol. Reproduc., 44(2):238-245, 1991. Generally, the genetic engineering is performed in an embryonic stem (ES) cell, or other pluripotent cell line (e.g., adult stem cells, EG cells), and that genetically-modified cell (or nucleus) is used to create a whole organism. Nuclear transfer can be used in combination with homologous recombination technologies.

[0173] For example, the differentially regulated cancer genes locus can be disrupted in mouse ES cells using a positive-negative selection method (e.g., Mansour et al., Nature, 336:348-352, 1988). In this method, a targeting vector can be constructed which comprises a part of the gene to be targeted. A selectable marker, such as neomycin resistance genes, can be inserted into a differentially regulated cancer genes exon present in the targeting vector, disrupting it. When the vector recombines with the ES cell genome, it disrupts the function of the gene. The presence in the cell of the vector can be determined by expression of neomycin resistance. See, e.g., U.S. Pat. No. 6,239,326. Cells having at least one functionally disrupted gene can be used to make chimeric and germline animals, e.g., animals having somatic and/or germ cells comprising the engineered gene. Homozygous knock-out animals can be obtained from breeding heterozygous knock-out animals. See, e.g., U.S. Pat. No. 6,225,525.

[0174] The present invention also relates to non-human, transgenic animal whose genome comprises recombinant differentially regulated cancer nucleic acid (and homologs thereof) operatively linked to an expression control sequence effective to express said coding sequence, e.g., in prostate and/or breast tissues. Such a transgenic animal can also be referred to as a “knock-in” animal since an exogenous gene has been introduced, stably, into its genome.

[0175] A recombinant differentially regulated cancer genes nucleic acid refers to a polynucleotide which has been introduced into a target host cell and optionally modified, such as cells derived from animals, plants, bacteria, yeast, etc. A recombinant differentially regulated cancer genes includes completely synthetic nucleic acid sequences, semi-synthetic nucleic acid sequences, sequences derived from natural sources, and chimeras thereof. “Operable linkage” has the meaning used through the specification, i.e., placed in a functional relationship with another nucleic acid. When a gene is operably linked to an expression control sequence, as explained above, it indicates that the gene (e.g., coding sequence) is joined to the expression control sequence (e.g., promoter) in such a way that facilitates transcription and translation of the coding sequence. As described above, the phrase “genome” indicates that the genome of the cell has been modified. In this case, the recombinant differentially regulated cancer genes has been stably integrated into the genome of the animal. The differentially regulated cancer genes nucleic acid (e.g., a coding sequence) in operable linkage with the expression control sequence can also be referred to as a construct or transgene.

[0176] The present invention also relates to a transgenic animal which contains a functionally disrupted and a transgene stably integrated into the animals genome. Such an animal can be constructed using combinations any of the above- and below-mentioned methods. Such animals have any of the aforementioned uses, including permitting the knock-out of the normal gene and its replacement with a mutated gene. Such a transgene can be integrated at the endogenous gene locus so that the functional disruption and “knock-in” are carried out in the same step.

[0177] In addition to the methods mentioned above, transgenic animals can be prepared according to known methods, including, e.g., by pronuclear injection of recombinant genes into pronuclei of 1-cell embryos, incorporating an artificial yeast chromosome into embryonic stem cells, gene targeting methods, embryonic stem cell methodology, cloning methods, nuclear transfer methods. See, also, e.g., U.S. Pat. Nos. 4,736,866; 4,873,191; 4,873,316; 5,082,779; 5,304,489; 5,174,986; 5,175,384; 5,175,385; 5,221,778; Gordon et al., Proc. Natl. Acad. Sci., 77:7380-7384, 1980; Palmiter et al., Cell, 41:343-345, 1985; Palmiter et al., Ann. Rev. Genet., 20:465-499, 1986; Askew et al., Mol. Cell. Bio., 13:4115l-4124, 1993; Games et al. Nature, 373:523-527, 1995; Valancius and Smithies, Mol. Cell. Bio., 11:1402-1408, 1991; Stacey et al., Mol. Cell. Bio., 14:1009-1016, 1994; Hasty et al., Nature, 350:243-246, 1995; Rubinstein et al., Nucl. Acid Res., 21:2613-2617, 1993; Cibelli et al., Science, 280:1256-1258, 1998. For guidance on recombinase excision systems, see, e.g., U.S. Pat. Nos. 5,626,159, 5,527,695, and 5,434,066. See also, Orban, P.C., et al., “Tissue- and Site-Specific DNA Recombination in Transgenic Mice,” Proc. Natl. Acad. Sci. USA, 89:6861-6865 (1992); O'Gorman, S., et al., “Recombinase-Mediated Gene Activation and Site-Specific Integration in Mammalian Cells,” Science, 251:1351-1355 (1991); Sauer, B., et al., “Cre-stimulated recombination at loxP-Containing DNA sequences placed into the mammalian genome,” Polynucleotides Research, 17(1):147-161 (1989); Gagneten, S. et al. (1997) Nucl. Acids Res. 25:3326-3331; Xiao and Weaver (1997) Nucl. Acids Res. 25:2985-2991; Agah, R. et al. (1997) J. Clin. Invest 100:169-179; Barlow, C. et al. (1997) Nucl. Acids Res. 25:2543-2545; Araki, K. et al. (1997) Nucl. Acids Res. 25:868-872; Mortensen, R. N. et al. (1992) Mol. Cell. Biol. 12:2391-2395 (G418 escalation method); Lakhlani, P. P. et al. (1997) Proc. Natl. Acad. Sci. USA 94:9950-9955 (“hit and run”); Westphal and Leder (1997) Curr. Biol. 7:530-533 (transposon-generated “knock-out” and “knock-in”); Templeton, N. S. et al. (1997) Gene Ther. 4:700-709 (methods for efficient gene targeting, allowing for a high frequency of homologous recombination events, e.g., without selectable markers); PCT International Publication WO 93/22443 (functionally-disrupted).

[0178] A polynucleotide according to the present invention can be introduced into any non-human animal, including a non-human mammal, mouse (Hogan et al., Manipulating the Mouse Embryo: A Laboratory Manual Cold Spring Harbor Laboratory, Cold Spring Harbor, N.Y., 1986), pig (Hammer et al., Nature, 315:343-345, 1985), sheep (Hammer et al., Nature, 315:343-345, 1985), cattle, rat, or primate. See also, e.g., Church, 1987, Trends in Biotech. 5:13-19; Clark et al., Trends in Biotech. 5:20-24, 1987); and DePamphilis et al., BioTechniques, 6:662-680, 1988. Transgenic animals can be produced by the methods described in U.S. Pat. No. 5,994,618, and utilized for any of the utilities described therein.

Database

[0179] The present invention also relates to electronic forms of polynucleotides, polypeptides, etc., of the present invention, including computer-readable medium (e.g., magnetic, optical, etc., stored in any suitable format, such as flat files or hierarchical files) which comprise such sequences, or fragments thereof, e-commerce-related means, etc. Along these lines, the present invention relates to methods of retrieving gene sequences from a computer-readable medium, comprising, one or more of the following steps in any effective order, e.g., selecting a cell or gene expression profile, e.g., a profile that specifies that said gene is differentially expressed in breast and/or prostate cancer, and retrieving said differentially expressed gene sequences, where the gene sequences consist of the genes represented by SEQ ID NOS 1, 3, 5, 7, 9, 11, 13, 15, 17, 19, 21,.23, 25, 27, 29, 45, 47, 50, 48, 52, 54, 56, 58, 60, 62, 64, 66, 68, 70, 72, 74, 84, 85, 86, 88, 95, and/or 99.

[0180] A “gene expression profile” means the list of tissues, cells, etc., in which a defined gene is expressed (i.e, transcribed and/or translated). A “cell expression profile” means the genes which are expressed in the particular cell type. The profile can be a list of the tissues in which the gene is expressed, but can include additional information as well, including level of expression (e.g., a quantity as compared or normalized to a control gene), and information on temporal (e.g., at what point in the cell-cycle or developmental program) and spatial expression. By the phrase “selecting a gene or cell expression profile,” it is meant that a user decides what type oQf gene or cell expression pattern he is interested in retrieving. Any pattern of expression preferences may be selected. The selecting can be performed by any effective method. In general, “selecting” refers to the process in which a user forms a query that is used to search a database of gene expression profiles. The step of retrieving involves searching for results in a database that correspond to the query set forth in the selecting step. Any suitable algorithm can be utilized to perform the search query, including algorithms that look for matches, or that perform optimization between query and data The database is information that has been stored in an appropriate storage medium, having a suitable computer-readable format. Once results are retrieved, they can be displayed in any suitable format, such as HTML.

[0181] For instance, the user may be interested in identifying genes that are differentially expressed in cancer. He may not care whether small amounts of expression occur in other tissues, as long as such genes are not expressed in peripheral blood lymphocytes. A query is formed by the user to retrieve the set of genes from the database having the desired gene or cell expression profile. Once the query is inputted into the system, a search algorithm is used to interrogate the database, and retrieve results.

Advertising, Licensing, etc., Methods

[0182] The present invention also relates to methods of advertising, licensing, selling, purchasing, brokering, etc., genes, polynucleotides, specific-binding partners, antibodies, etc., of the present invention. Methods can comprises, e.g., displaying a differentially regulated cancer genes gene, differentially regulated cancer genes polypeptide, or antibody specific for differentially regulated cancer genes in a printed or computer-readable medium (e.g., on the Web or Internet), accepting an offer to purchase said gene, polypeptide, or antibody.

Other

[0183] A polynucleotide, probe, polypeptide, antibody, specific-binding partner, etc., according to the present invention can be isolated. The term “isolated” means that the material is in a form in which it is not found in its original environment or in nature, e.g., more concentrated, more purified, separated from component, etc. An isolated polynucleotide includes, e.g., a polynucleotide having the sequenced separated from the chromosomal DNA found in a living animal, e.g., as the complete gene, a transcript, or a cDNA. This polynucleotide can be part of a vector or inserted into a chromosome (by specific gene-targeting or by random integration at a position other than its normal position) and still be isolated in that it is not in a form that is found in its natural environment. A polynucleotide, polypeptide, etc., of the present invention can also be substantially purified. By substantially purified, it is meant that polynucleotide or polypeptide is separated and is essentially free from other polynucleotides or polypeptides, i.e., the polynucleotide or polypeptide is the primary and active constituent. A polynucleotide can also be a recombinant molecule. By “recombinant,” it is meant that the polynucleotide is an arrangement or form which does not occur in nature. For instance, a recombinant molecule comprising a promoter sequence would not encompass the naturally-occurring gene, but would include the promoter operably linked to a coding sequence not associated with it in nature, e.g., a reporter gene, or a truncation of the normal coding sequence.

[0184] The term “marker” is used herein to indicate a means for detecting or labeling a target. A marker can be a polynucleotide (usually referred to as a “probe”), polypeptide (e.g., an antibody conjugated to a detectable label), PNA, or any effective material.

[0185] The topic headings set forth above are meant as guidance where certain information can be found in the application, but are not intended to be the only source in the application where information on such topic can be found. Reference materials For other aspects of the polynucleotides, reference is made to standard textbooks of molecular biology. See, e.g., Hames et al., Polynucleotide Hybridization, IL Press, 1985; Davis et al., Basic Methods in Molecular Biology, Elsevir Sciences Publishing, Inc., New York, 1986; Sambrook et al., Molecular Cloning CSH Press, 1989; Howe, Gene Cloning and Manipulation, Cambridge University Press, 1995; Ausubel et al., Current Protocols in Molecular Biology, John Wiley & Sons, Inc., 1994-1998.

[0186] Without further elaboration, it is believed that one skilled in the art can, using the preceding description, utilize the present invention to its fullest extent. The following preferred specific embodiments are, therefore, to be construed as merely illustrative, and not limitative of the remainder of the disclosure in any way whatsoever. The entire disclosure of all applications, patents and publications, cited above and in the figures are hereby incorporated by reference in their entirety.

TABLE 1

| Clone ID | Protein-L* | Location | Domains Names |
|---|---|---|---|
| 1. Pcp0749-2z | 1564aa | Nuclear | 1. ZnF_C3H1 domain: 36-63aa; |
| | | | 2. Caldesmon domain: 423-1027aa; |
| | | | 3. Coiled coil: 162-197aa; |
| | | | 4. Coiled coil: 645-789aa; |
| | | | 5. Coiled coil: 1339-1366aa. |
| 2. Pcp0389Az | 694aa | Extracellular | 1. Coiled coil: 17-51aa; |
| | | | 2. Methyl-accepting chemotaxis-like domain |
| | | | (MA): 101-200aa. |
| 3. Pcp0814z | 279aa | Membrane | 1. Transmembrane domain: 83-105aa; |
| | | | 2. Transmembrane domain: 120-142aa; |
| | | | 3. Transmembrane domain: 192-211aa; |
| | | | 4. MotA/TolQ/ExbB proton channel domain: 34-156aa; |
| | | | 5. Coiled coil: 226-253aa. |
| 4. Pcp0623 | 2697aa | Nuclear | 1. Caldesmon domain: 590-884aa. |
| 5. Pcp0815 | 1041aa | Nuclear | 1. ZF_C2H2: 371-393aa; |
| | | | 2. ZF_C2H2: 399-421aa; |
| | | | 3. ZF_C2H2: 621-651aa; |
| | | | 4. ZF_C2H2: 657-679aa; |
| | | | 5. ZF_C2H2: 689-711aa; |
| | | | 6. ZF_C2H2: 909-931aa; |
| | | | 7. ZF_C2H2: 938-961aa; |
| | | | 8. PP_M1 Phosphoprotein domain: 754-923aa. |
| 6. Pcp0840z | 243aa | Nuclear | 1. ZnF_C2H2 domains: 12-37aa; |
| | | | 2. ZnF_C2H2 domains: 173-198aa; |
| | | | 3. ZnF_C2H2 domains: 208-230aa. |
| 7. Pcp0424Az | 789aa | Cytoplasm | 1. Dynamin, large GTPase domain: 54-308aa. (GTP- |
| | | | binding); |
| | | | 2. Dynamin GTPase effector domain: 692-783aa. |
| 7. Pcp0424Bz | 763aa | Cytoplasm | 1. Dynamin, large GTPase domain: 54-308aa. (GTP- |
| | | | binding); |
| | | | 2. Dynamin GTPase effector domain: 692783aa; |
| 7. Pcp0424Cz | 752aa | Cytoplasm | 1. Dynamin, large GTPase domain: 54-308aa. (GTP- |
| | | | binding); |
| | | | 2. Dynamin GTPase effector domain: 692-783aa. |
| 8. Pc0382 | 1584aa | Nuclear | 1. SAM domain: 11-78aa; |
| | | | 2. Kinesin domain: 1079-1103aa. |
| 9. Pcp0816 | 1013aa | Membrane | 1. Signal peptide: 1-38aa; |
| | | | 2. EGF-like domain: 274-308aa; |
| | | | 3. Transmembrane domain: 908-930aa. |
| 10. Pcp0480 | 171aa | Nuclear | 1. Estrogen receptor: 1-169aa. |
| 11. Pcp0842x | 2221aa | Cytoplasm | 1. SET7 domain: 630-842aa |

L* stands for protein length in amino acids

[0187] TABLE 2

| Clone ID | Locus | Associated diseases |
|---|---|---|
| 1. Pcp0749-2z | 13q14.11 | 1. Rieger syndrome type 2 at 13q14; |
| | | 2. Low grade B-cell malignancy at 13q14. |
| 2. Pcp0389Az | 6q22.33 | 1. IgA Nephropathy at 6q22-q23; |
| | | 2. Autosomal recessive craniometaphyseal dysplasia at 6q21-q22; |
| | | 3. Heterocellular hereditary persistence of fetal hemoglobin at 6q22.3-q23.1; |
| | | 4. Oculodentodigital dysplasia at 6q22-q24; |
| | | 5. Susceptibility to severe hepatic fibrosis due to Schistosoma mansoni |
| | | infection at 6q22-q23. |
| 3. Pcp0814z | 12p13.3 | 1. Chromosomal abnormalities associated with breast and |
| | | ovary cancer. |
| 4. Pcp0623 | 5p13.2 | |
| 5. Pcp0815 | 14q11.1 | 1. Respiratory allergies (asthma) at 14q11.1 |
| 6. Pcp0840z | 7p15.1 | |
| 7. Pcp0424Az | 12p12.3 | 1. Alzheimer disease familial type 5 at 12p11.23-q13.12; |
| | | 2. Fibrosis of extraocular muscles congenital 1at 12p11.2-q12; |
| | | 3. Hypertension with brachydactyly at 12p12.2-p11.2. |
| 7. Pcp0424Bz | 12p12.3 | same as Bcu0424Az. |
| 7. Pcp0424Cz | 12p12.3 | same as Bcu0424Az. |
| 8. Pc0382 | 7q21.3 | 1. Split-hand/foot malformation type-1(SHFM1) at 7q21.2-q21.3; |
| | | 2. SHFM with sensorineural hearing loss (SHFM1D at 7q21.2-21.3.); |
| | | 4. Malignant hyperthermia susceptibility 3 at 7q21-q22; |
| | | 5. Myoclonic dystonia-11 at 7q21. |
| 9. Pcp0816 | 1p13.1 | 1. Vesicoureteral reflux (VUR) at 1p13; |
| | | 2. Trisomy and Monosomy at 1p13 cause cancers in prostate, ovary |
| | | and breast. |
| 10. Pcp0480 | 6q25.1 | 1. Estrogen receptor-1 at 6q25.1(Alternative isoforms are related to |
| | | breast cancer); |
| | | 2. Schizophrenia-5 at 6q26-q13; |
| | | 3. Insulin-dependent diabetes mellitus-8 at 6q25-q27. |
| 11. Pcp0842x | 6q23.3 | 1. Dilated cardiomyopathy 1J (CMD1J) at 6q23-q24; |
| | | 2. Dilated cardiomyopathy 1F (CMD1F) at 6q23; |
| | | 3. Oculodentodigital dysplasia (ODDD) at 6q22-q24; |
| | | 4. Susceptibility to severe hepatic fibrosis due to Schistosoma mansoni |
| | | infection at 6q22-q23; |
| | | 5. IgA nephropathy at 6q22-q23. |

[0188] TABLE 3

| Gene | | | |
|---|---|---|---|
| Name | SEQ ID NO | Expression | |
| PCP0749 | 1-4 | UP | |
| PCP0389 | 5-8 | UP | |
| PCP0814 | 9-10 | DOWN | |
| PCP0623 | 11-12 | DOWN | |
| PCP0815 | 13-14 | UP | |
| PCP0840 | 15-16 | DOWN | |
| PCP0424 | 17-18 (A); 19-20 (B); | UP | |
| | 21-22 (C) | | |
| PC0382 | 23-24 | UP | |
| PCP0816 | 25-26 | UP | |
| PCP0480 | 27-28 | UP | normal expression |
| | | | restricted to muscle |
| | | | and uterus |
| PCP0842 | 29-30 | UP | |

[0189] TABLE 4

| GENE | EXPRESSION | LENGTH | DOMAINS |
|---|---|---|---|
| 1. PCP0405 | DOWN | 1379 | 1. CUB domain: 93-209aa; |
| (SEQ ID NO 45-46) | | | 2. DSL domain: 222-280aa; |
| | | | 3. Kelch domain: 480-531aa; |
| | | | 4. Kelch domain: 532-591aa; |
| | | | 5. PSI domain: 614-657aa; |
| | | | 6. PSI domain: 666-709aa; |
| | | | 7. CLECT domain: 748-873aa; |
| | | | 8. PSI domain: 889-939aa; |
| | | | 9. PSI domain: 942-1012aa; |
| | | | 10. EGF-like domain: 1014-1057aa; |
| | | | 11. EGF-like domain: 1060-1106aa; |
| | | | 12. Transmembrane domain: 1230-1252aa. |
| 2. PCP0454A | DOWN | 3863 | 1. Internal repeat 2: 19-72; |
| (SEQ ID NO 50-51) | | | 2. Internal repeat 1: 71-135; |
| | | | 3. Internal repeat 2: 332-385; |
| | | | 4. Internal repeat 1: 488-554. |
| PCP0454B | DOWN | 577 | 1. Internal repeat 1: 1-137; |
| (SEQ ID NO 48-49) | | | 2. AAA domain: 241-408. |
| 3. PCP0459 | UP | 715 | 1. Gag p10 domain: 1-89; |
| (SEQ ID NO 52-53) | | | 2. Gag p24 domain: 360-573; |
| | | | 3. ZnF C2HC domain: 592-608; |
| | | | 4. ZnF C2HC domain: 629-645. |
| 4. PC0177A | UP | 1744 | 1. Coiled coil: 646-685; |
| (SEQ ID NO 54-55) | | | 2. Coiled coil: 1469-1481; |
| | | | 3. Coiled coil: 1656-1684. |
| PC0177B | UP | 1709 | 1. Coiled coil: 611-650; |
| (SEQ ID NO 56-57) | | | 2. Coiled coil: 1434-1456; |
| | | | 3. Coiled coil: 1621-1649. |
| PC0177C | UP | 1908 | 1. Coiled coil: 611-650; |
| (SEQ ID NO 58-59) | | | 2. Coiled coil: 1434-1456; |
| | | | 3. Coiled coil: 1621-1649. |
| PC0177D | UP | 1309 | 1. Coiled coil: 611-650 |
| (SEQ ID NO 60-61) | | | |
| 5. PCP0557 | UP | 1593 | 1. HisKA: 565-620; |
| (SEQ ID NO 62-63) | | | 2. Coiled coil: 933-965; |
| | | | 3. Coiled coil: 1464-1491. |
| 6. PCP0664 | UP | 112 | 1. Transmembrane: 4-26. |
| (SEQ ID NO 64-65) | | | |
| 7. PCP0677 | UP | 89 | No domain found. |
| (SEQ ID NO 66-67) | | | |
| 8. PCP0762 | UP | 221 | 1. SCAN domain 42-137 |
| (SEQ ID NO 68-69) | | | |
| 9. PCP0806 | UP | 548 | 1. SCOP domain: 10-122 |
| (SEQ ID NO 70-71) | | | 2. Coiled coil: 374-409 |
| 10. PCP0815A | UP | 1005 | 1. ZnF C2H2 domain: 371-393; |
| (SEQ ID NO 72-73) | | | 2. ZnF C2H2 domain: 399-421; |
| | | | 3. ZnF C2H2 domain: 629-651; |
| | | | 4. ZnF C2H2 domain: 657-679; |
| | | | 5. ZnF C2H2 domain: 689-711; |
| | | | 6. ZnF C2H2 domain: 909-931; |
| | | | 7. ZnF C2H2 domain: 9380961. |
| PCP0815C | UP | 198 | No domain found |
| (SEQ ID NO 74-75) | | | |

[0190] TABLE 5

| Clone ID | Locus | Diseases |
|---|---|---|
| PCP0405 | 10q26 | Cancers |
| PCP0454 | 6q15 | Amaurosis Congenita Of Leber V; |
| | | Cardiomyopathy, Dilated, 1k (Cmd1k); |
| | | Chorioretinal Atrophy, Progressive Bifocal; |
| | | Macular Dystrophy, Retinal, 1, North Carolina Type (Mcdr1) |
| PCP0459 | 22q11.21 | Cancers |
| PC0177 | 10p11.22 | Diabetes |
| PCP0577 | Xq25-q26.3 | Mental Retardation, X-Linked, With Short Stature, Small Testes, |
| | | Muscle Wasting, And Tremor; |
| | | Hypertrichosis, Congenital Generalized (Htc2); |
| | | Borjeson-Forssman-Lehmann Syndrome (Bfls); |
| | | Mental Retardation |
| PCP0664 | Xq25-Xq26 | Mental Retardation, X-Linked, With Isolated Growth Hormone |
| | | Deficiency (Mrgh) |
| | | Hypertrichosis, Congenital Generalized (Htc2); |
| | | Mental Retardation, X-Linked, South African Type; |
| | | Borjeson-Forssman-Lehmann Syndrome (Bfls); |
| | | Mental Retardation With Optic Atrophy, Deafness, And Seizures; |
| | | Mental Retardation |
| PCP0677 | 12q15 | Scapuloperoneal Myopathy (SPM); |
| | | Cancers (e.g., glioma) |
| PCP0762 | 18q12.1 | Cancers |
| PCP0806 | 2q37.3 | Gracile Syndrome; |
| | | Holoprosencephaly 6 |
| PCP0815 | 14q11.1-q12 | Arrhythmogenic Right Ventricular Dysplasia, Familial, 3 (Arvd3); |
| | | Radiation Sensitivity/Chromosome Instability Syndrome, |
| | | Autosomal Dominant; |
| | | Asthma |

[0191] Without further elaboration, it is believed that one skilled in the art can, using the preceding description, utilize the present invention to its fullest extent. The preceding preferred specific embodiments are, therefore, to be construed as merely illustrative, and not limitative of the remainder of the disclosure in any way whatsoever.

[0192] In the foregoing and in the examples, all temperatures are set forth uncorrected in degrees Celsius and, all parts and percentages are by weight, unless otherwise indicated.

[0193] The entire disclosures of all applications, patents and publications, cited herein and of corresponding International application No. PCT/US03/01943, filed Jan. 24, 2003; U.S. application Ser. No. 10/054,935, filed Jan. 25, 2002; U.S. Provisional Application Ser. No. 60/356,130, filed Feb. 14, 2002; U.S. application Ser. No. 10/102,946, filed Mar. 22, 2002; U.S. application Ser. No. 10/117,229, filed Apr. 8, 2002; U.S. application Ser. No. 10/144,198, filed May 14, 2002 and U.S. application Ser. No. 10/197,824, filed Jul. 19, 2002, are incorporated by reference herein.

[0194] The preceding examples can be repeated with similar success by substituting the generically or specifically described reactants and/or operating conditions of this invention for those used in the preceding examples.

[0195] From the foregoing description, one skilled in the art can easily ascertain the essential characteristics of this invention and, without departing from the spirit and scope thereof, can make various changes and modifications of the invention to adapt it to various usages and conditions.

1. An isolated polynucleotide comprising,
a polynucleotide sequence which codes without interruption for the amino acid sequence selected from SEQ ID NOS 2, 4, 6, 8, 10, 12, 14, 16, 18, 20, 22, 24, 26, 28, 30, 46, 51, 49, 53, 55, 57, 59, 61, 63, 65, 67, 69, 71, 73, 75, 87, 89, 96, and 100, or a complement thereto.

2. An isolated polynucleotide comprising,
a polynucleotide sequence having 95% or more sequence identity along the entire length of a polynucleotide sequence selected from SEQ ID NOS 1, 3, 5, 7, 9, 11, 13, 15, 17, 19, 21, 23, 25, 27, 29, 45, 47, 50, 48, 52, 54, 56, 58, 60, 62, 64, 66, 68, 70, 72, 74, 84, 85, 86, 88, 95, and 99, or a complement thereto.

3. An isolated polynucleotide comprising,
a differentially regulated mammalian cancer gene having a polynucleotide sequence which hybridizes under high stringency conditions to a polynucleotide having a polynucleotide sequence set forth in SEQ ID NOS 1, 3, 5, 7, 9, 11, 13, 15, 17, 19, 21, 23, 25, 27, 29, 45, 47, 50, 48, 52, 54, 56, 58, 60, 62, 64, 66, 68, 70, 72, 74, 84, 85, 86, 88, 95, and 99, or a complement thereto

4. An isolated polynucleotide of claim 3, wherein said high stringency conditions comprise hybridizing 42° C. in 5×SSPE, 0.3% SDS, and 50% formamide, and washes at 65° C. for 15 minutes in 2×SSC, and 0.2% SDS.

5. An isolated human polypeptide which is differentially regulated in a human cancer, comprising the complete amino acid sequence as set forth in SEQ ID NOS 2, 4, 6, 8, 10, 12, 14, 16, 18, 20, 22, 24, 26, 28, 30, 46, 51, 49, 53, 55, 57, 59, 61, 63, 65, 67, 69, 71, 73, 75, 87, 89, 96, or 100, or a specific fragment thereof.

6. An isolated mammalian polypeptide which is differentially regulated in a mammalian cancer, having 95% or more sequence identity along its entire length to a complete amino acid sequence as set forth in SEQ ID NOS 2, 4, 6, 8, 10, 12, 14, 16, 18, 20, 22, 24, 26, 28, 30, 46, 51, 49, 53, 55, 57, 59, 61, 63, 65, 67, 69, 71, 73, 75, 87, 89, 96, or 100, or a specific fragment thereof.

7. An isolated polypeptide which is coded for by a polynucleotide of claim 2.

8. A method of detecting a nucleic acid coding for human differentially regulated cancer genes, comprising,
contacting a sample comprising nucleic acid with a polynucleotide probe specific for a differentially regulated human cancer gene of claim 1 under conditions effective for said probe to hybridize specifically with said gene, and
detecting hybridization between said probe and said nucleic acid.

9. A method of claim 8, wherein said detecting is performed by:
Northern blot analysis, polymerase chain reaction (PCR), reverse taanscriptase PCR, RACE PCR, or in situ hybridization.

10. A method of treating a cancer showing altered expression of differentially regulated human cancer gene, comprising:
administering to a subject in need thereof a therapeutic agent which is effective for regulating expression of a differentially regulated human cancer gene of claim 1

11. A method of claim 10, wherein said agent is an antibody or an antisense which is effective to inhibit translation of said gene.

12. A method of diagnosing a cancer associated with abnormal expression of a differentially regulated human cancer gene, or determining a subject's susceptibility to such cancer, comprising:
assessing the expression of a differentially regulated human cancer gene of claim 1 in a tissue sample comprising prostate or breast cells.

13. A method of claim 12, wherein assessing is:
measuring expression levels of said gene, determining the genomic structure of said gene, determining the mRNA structure of transcripts from said gene, or measuring the expression levels of polypeptide coded for by said gene.

14. A method of claim 12, wherein said assessing is performed by:
Northern blot analysis, polymerase chain reaction (PCR), reverse transcriptase PCR, RACE PCR, or in situ hybridization, and
using a polynucleotide probe having a polynucleotide sequence selected from SEQ ID NOS 1, 3, 5, 7, 9, 11, 13, 15, 17, 19, 21, 23, 25, 27, 29, 45, 47, 50, 48, 52, 54, 56, 58, 60, 62, 64, 66, 68, 70, 72, 74, 84, 85, 86, 88, 95, and 99, or a complement thereto.

15. A method of assessing a therapeutic or preventative intervention in a subject having cancer, comprising,
determining the expression levels of differentially regulated cancer genes of claim 1 in a tissue sample comprising prostate or breast cells.

16. A method for identifying an agent that modulates the expression of differentially regulated cancer gene expressed in breast or prostate tissue cells, comprising,
contacting a cell population comprising breast or prostate cells with a test agent under conditions effective for said test agent to modulate the expression of a differentially regulated cancer gene of claim 1 in said breast or prostate cells, and
determining whether said test agent modulates said differentially regulated cancer gene.

17. A method for identifying an agent that modulates the expression of a polypeptide coded for by a differentially regulated cancer gene expressed in breast or prostate tissue cells, comprising,
contacting a polypeptide coded for by a differentially regulated cancer gene of claim 1, with a test agent under conditions effective for said test agent to modulate said polypeptide, and
determining whether said test agent modulates said polypeptide.

18. A method of claim 16, wherein said test agent is an antibody.

19. A method of detecting polymorphisms in differentially regulated cancer genes comprising:
comparing the structure of: genomic DNA comprising all or part of differentially regulated cancer genes, mRNA comprising all or part of differentially regulated cancer genes, cDNA comprising all or part of differentially regulated cancer genes, or a polypeptide comprising all or part of differentially regulated cancer genes, with the structure of a differentially regulated cancer gene as set forth in a polynucleotide sequence selected from SEQ ID NOS 1, 3, 5, 7, 9, 11, 13, 15, 17, 19, 21, 23, 25, 27, 29, 45, 47, 50, 48, 52, 54, 56, 58, 60, 62, 64, 66, 68, 70, 72, 74, 84, 85, 86, 88, 95, and 99.

20. A method of identifying a genetic basis for a prostate or breast cancer, or susceptibility thereto, comprising:
determining the association of cancer, suceptibility thereto, with a polynucleotide of claim 1.

21. A method of claim 20, wherein determining is performed by producing a human-linkage map using said polynucleotide.

22. A method of claim 20, wherein determining is performed by comparing the nucleotide sequences of said polynucleotide between normal subjects and subjects having cancer.

23. A non-human, transgenic mammal, or a cell thereof, whose genome comprises a functional disruption of a homolog of a differentially regulated cancer gene of claim 1.

24. An antibody which is specific-for a differentially regulated cancer gene polypeptide of claim 5.

25. A method of advertising differentially regulated cancer genes for sale, commercial use, or licensing, comprising,
displaying in a computer-readable medium a polynucleotide set forth in SEQ ID NOS 1, 3, 5, 7, 9, 11, 13, 15, 17, 19, 21, 23, 25, 27, 29, 45, 47, 50, 48, 52, 54, 56, 58, 60, 62, 64, 66, 68, 70, 72, 74, 84, 85, 86, 88, 95, or 99 of claim 1, effective specific fragments thereof, or complements thereto.

26. A method of selecting a polynucleotide sequence coding for differentially regulated cancer genes from a database comprising polynucleotide sequences, comprising
displaying, in a computer-readable medium, a polynucleotide sequence or polypeptide sequence for one or more differentially regulated cancer genes of claim 1, or complements to the polynucleotides sequence,
wherein said displayed sequences have been retrieved from said database upon selection by a user.

The application's sequence listing, which the Patent Office published only in electronic form, follows.

SEQUENCE LISTING (102 sequences)

SEQ ID NO: 1 - DNA, 6726 bp, Homo sapiens
  CDS (367)..(5061)
gagaggaacagggcaaacctctgacttccggcggcattttgaggcggtcctcctagcggcctggtagtgtttttgttgccttttcttaatctacaatctcttcgttatttttcttcctgcgacccagtttcgcttgaccctggagaggcggcgggcgggttggttctgcttctcagccatcccgggggctcctcgctagccaagagccggttcccgggagccgcgcgcgcatcgctttctcctcgtcgtcgtcctcctgggtccaggcgcggggacagagtcgcctcccccgctcctcggagcggcggcggcggtggtgcctccggactgcacttgcgaagggagcttggggaggaatagtacaaaatgtcaaaaattagaaggaaggtcacagtggaaaataccaagactatatctgatagcacatcccgaagacccagtgtatttgagaggcttggacccagcactggcagtacagcagagacacagtgccgtaactggctgaagactggcaactgcctctatggaaacacatgtagattcgtacatggcccttcacctcgtggtaaaggttatagcagcaattatagaaggtcaccagaaagacctacaggggatcttagagaaagaatgaagaacaagcgccaagacgtggacactgagccccagaaacgaaatacagaggagtcatcctcacctgttaggaaagaatcttcaagagggagacatagggaaaaggaagacataaaaatcactaaggaaagaactccagaaagtgaagaagaaaatgtagaatgggaaactaatagagatgattctgacaatggagatattaattatgattatgttcatgaattgtcattggaaatgaagcgtcagaagatacagagggaattaatgaagctggaacaagaaaacatggagaagagagaagaaattatcattaaaaaggaggtttcaccagaagtggttagatcaaaattgtccccgtcaccttctctaagaaagtctagcaaatctccgaagcgaaaatcaagcccgaagtcgtcttcagctagcaagaaagataggaagacatctgcagtatcttctcccctgttggaccagcagagaaattcaaaaaccaaccaaagtaaaaagaaaggaccacgtactcctagtccaccccctcctataccagaagatatcgctctggggaaaaaatacaaagaaaaatataaagtaaaagacaggatagaagaaaaaacaagagatggaaaggacagaggacgagattttgaacgacaaagagaaaagagagacaagccaaggtctacttccccagcaggacagcatcattctcctatatcttctagacatcactcatcttcctcacaatcaggatcatctattcaaagacattctccttctcctcgtcgaaaaagaactccttcaccatcttatcagcggacactaactccacctttacgacgctctgcctctccttatccttcacattctttgtcgtctccccagagaaagcagagtcctccaagacatcgctctccaatgcgagagaaagggagacatgatcatgaacgaacttcacagtctcatgatcgacgccacgaaaggagggaagatactaggggcaaacgagacagagaaaaggactcaagagaagaacgagaatatgaacaggatcagagctcttctagagaccacagagatgacagagaacctcgagatggtcgggatcggagagatgccagagatactagggaccgaagggaactaagagactccagagacatgcgggactcaagggagatgagagattatagcagagataccaaagagagccgtgatcccagagattctcggtccactcgtgatgcccatgactacagggaccgtgaaggtcgagatactcatcgaaaggaggatacatatccagaagaatcccggagttatggccgaaaccatttgagagaagaaagttctcgtacggaaataaggaatgagtccagaaatgagtctcgaagtgaaattagaaatgaccgaatgggccgaagtagggggagggttcctgagttacctgaaaagggaagtcgaggctcaagaggttctcaaattgatagtcacagtagtaatagcaactatcatgacagctgggaaactcgaagtagctatcctgaaagagatagatatcctgaaagagacaacagagatcaagcaagggattcttcctttgagagaagacatggagagcgagaccgtcgtgacaacagagagagagatcaaagaccaagctcaccaattcgacatcagggaaggaatgacgagcttgagcgtgatgaaagaagagaggaacgaagagtagacagagtggatgataggagagatgaaagggctagagagagagatcgggaacgagaacgagacagggagcgggagagagagagggaacgtgaacgggatcgggaaagagaaaaagagagagaactagaaagagagcgtgctagggaacgggagagagaaagagaaaaagagagagatcgtgaaagggatagagaccgagaccacgatcgagagcgggaaagagagagggaacgagacagggaaaaagaacgggaacgagaaagagaagagagagagagggagagagagcgagaacgggagagagagcgagagcgagaacgggaacgagaaagagcgagagaaagggataaagaacgagaacgccaaagggattgggaagacaaagacaaaggacgagatgaccgcagagaaaagcgagaagagatccgagaagataggaatccaagagatggacatgatgaaagaaaatcaaagaagcgctatagaaatgaagggagtcccagccctagacagtccccgaagcgccggcgtgaacattctccggacagtgatgcctacaacagtggagatgataaaaatgaaaaacacagactcttgagccaagttgtacgacctcaagaatctcgttctcttagtccctcgcacctcacagaagacagacagggtagatggaaagaggaggatcgtaaaccagaaaggaaagagagttcaaggcgctacgaagaacaggaactcaaggagaaagtttcttctgtagataaacagagagaacagacagaaatcctggaaagctcaagaatgcgtgcacaggacattataggacaccaccagtctgaagatcgagagacatctgatcgagctcatgatgaaaacaagaagaaagcaaaaattcaaaagaaaccaattaagaaaaagaaagaggatgatgttggaatagagaggggtaacatagagacaacatctgaagatggtcaagtattttcaccaaaaaaaggacagaaaaagaaaagcattgaaaaaaaacgtaaaaaatccaaaggtgattctgatatttctgatgaagaagcagcccagcaaagtaagaagaaaagaggcccacggactccccctataacaactaaagaggaattggttgaaatgtgcaatggtaagaatggtattctagaggactcccagaaaaaagaagatacagcattcagtgactggtctgatgaggatgtccctgaccgtacagaggtgacagaagcagagcatactgccaccgccacgactcctggtagtaccccttctcctctatcttctcttcttcctcctccaccgcctgtggctactgccactgctacaactgtgcctgcaactcttgctgccactactgctgctgccgccacctctttcagcacatctgccatcactatttccacctctgccacccccaccaataccaccaataatacttttgccaatgaagactcacacagaaaatgccacagaacacgagtagaaaaagtagagacgcctcacgtgactatagaagatgcacagcatcgcaagcctatggatcaaaagaggagcagcagcctcgggagcaatcggagtaaccgtagtcatacgtctggtcgtcttcgctccccatccaatgattcagcccatcgaagtggagatgaccaaagtggtcgaaagagagtactgcacagtggctcaagagatagagaaaaaacaaaaagcctggaaatcacaggagagagaaaatctaggattgatcagttaaagcgtggagaacccagtcgaagtacttcttcagatcgccaggattcaagaagccatagttcaagaagaagttctccagagtcagatcgacaggtccattcaagatctgggtcatttgatagcagagacaggcttcaagaacgagatcgatatgaacacgacagagagcgcgagagagagaggagagatacgaggcagagagaatgggaccgagatgctgataaagattggccacgcaacagggatcgagatagattgcgagaacgagaacgagagagagaacgagacaaaaggagagacttggatagggaaagagagagactaatttctgattctgttgaaagggacagggacagagacagagacagaacttttgagagttctcaaatagagtctgtgaaacgctgtgaagcaaaactggaaggtgaacatgaaagggatctagaaagcacttcccgagactctctagccttggataaagagagaatggataaagatctgggatctgtgcagggatttgaagatacaaataaatccgagagaactgagagtctggaagcaggagatgacgagtccaagttagatgatgcacattcattaggctctggtgctggagaaggatacgagccaatcagtgatgacgaactagatgaaattctggcaggtgatgcagaaaagagggaggaccaacaggatgaggagaagatgccagatcccttagatgtgatagatgtggattggtctggtcttatgccaaagcatccaaaagaaccacgagagcctggggctgcactcttaaaattcacacctggagctgttatgctaagagttgggatttctaaaaagttggcaggttctgaactctttgccaaagtcaaagaaacatgtcagagacttttagaaaaacccaaaggtagtttcattttactttaactatataatgtctgttaaccatttaagatgccatctgaaggggattctgatctgttcttatgtagcacttaacactgtgtagaaactattttttgagaaatcattttataatcattatttaaccctcatggtcaaagtttctctttaaaatttattttgagaagaagagttatcccacagaaaagttgggaaaagagtacaatgacctttttgtatgaaaattacttattaacaggccaggcgtggtgttgcatgtctgtagtcacagctactcagggaggttgaggcagcaggattgctggagcccaggaaattgaggctgcagtgagccatgattgagccaccacactccaacctaggtgacagagcaagaccctgtctcaaaaaaaaaaaaacaaattaaccaataagttctaatatcaaagtgctcagtggtttgcccttggctaaatgaagcagagccaggaaaaacagactacatatttttcatgtctaaagaaattgggtattttggcagccctttcccctagacatctacccaaatgcaggtgtgtaggttgagtctttaacaaagtgattaagagcttggtctgtaaggccggatgatctggatttcagtaggcacaccacttactggctattacttaatctgtgtgttagtgtcatcatctgtaagtcaggaataatcataccaccaacttcctatggtaattaggagcaaatgagttattacaggcaaaacacttagaacagttcctggcatatagtaatacccaataaatattaactgctactttgaaaatatcctatcacgctgatttttgacctcactgcagcaattttcagttattccagattatctagcttatggattctggtggtaggggttgtttggttttggttttcactgtctctgtctcatctagtacctaccttagtttattttgcaacttactaatactttattaatggggagggacgagtagatggtaaaaagaaggaaaaggaggtaaaaggtgaaaggaacaacattaattaacaattttacgtcatgtccctggacataaaagtttagttagtattaaatttttcactaatacaaaataaaaaaatattgttttatgagttttatgaattcatgcccttcctttactctattagcataagcagtaaatttttttattttaatatagcccaataaacctagagtatacatgtacaaaatacatataattgttaacgtgtattaaccgaaaaatgacccaagacttagttcttgccctactgtatctgccttgtttggttggttctgtgaccttaagcaaataactcctgtgagcctcaattttatttgtaaagtgatggaataaaacccctaaaatcttacccacctctaaagatatttgtttctgtgaccttttgctagtagcatttcaagttaaaatctggtttgattttgctacccatgaaatacagttcggcccttacttattgatgacttaacctaaacagtgaaaatatgcactgtaaagggtggggtgatgtggcttaacaatcagacttcttctatttttgctgctatggtggttgtattagagaactgatgtattatcttgaataaagactttgtcttgtttactgccctaaaaaaaaaaaaaaaaaaaa

SEQ ID NO: 2 - protein, 1564 aa, Homo sapiens
MSKIRRKVTVENTKTISDSTSRRPSVFERLGPSTGSTAETQCRNWLKTGNCLYGNTCRFVHGPSPRGKGYSSNYRRSPERPTGDLRERMKNKRQDVDTEPQKRNTEESSSPVRKESSRGRHREKEDIKITKERTPESEEENVEWETNRDDSDNGDINYDYVHELSLEMKRQKIQRELMKLEQENMEKREEIIIKKEVSPEVVRSKLSPSPSLRKSSKSPKRKSSPKSSSASKKDRKTSAVSSPLLDQQRNSKTNQSKKKGPRTPSPPPPIPEDIALGKKYKEKYKVKDRIEEKTRDGKDRGRDFERQREKRDKPRSTSPAGQHHSPISSRHHSSSSQSGSSIQRHSPSPRRKRTPSPSYQRTLTPPLRRSASPYPSHSLSSPQRKQSPPRHRSPMREKGRHDHERTSQSHDRRHERREDTRGKRDREKDSREEREYEQDQSSSRDHRDDREPRDGRDRRDARDTRDRRELRDSRDMRDSREMRDYSRDTKESRDPRDSRSTRDAHDYRDREGRDTHRKEDTYPEESRSYGRNHLREESSRTEIRNESRNESRSEIRNDRMGRSRGRVPELPEKGSRGSRGSQIDSHSSNSNYHDSWETRSSYPERDRYPERDNRDQARDSSFERRHGERDRRDNRERDQRPSSPIRHQGRNDELERDERREERRVDRVDDRRDERARERDRERERDRERERERERERDREREKERELERERAREREREREKERDRERDRDRDHDRERERERERDREKEREREREERERERERERERERERERERERARERDKERERQRDWEDKDKGRDDRREKREEIREDRNPRDGHDERKSKKRYRNEGSPSPRQSPKRRREHSPDSDAYNSGDDKNEKHRLLSQVVRPQESRSLSPSHLTEDRQGRWKEEDRKPERKESSRRYEEQELKEKVSSVDKQREQTEILESSRMRAQDIIGHHQSEDRETSDRAHDENKKKAKIQKKPIKKKKEDDVGIERGNIETTSEDGQVFSPKKGQKKKSIEKKRKKSKGDSDISDEEAAQQSKKKRGPRTPPITTKEELVEMCNGKNGILEDSQKKEDTAFSDWSDEDVPDRTEVTEAEHTATATTPGSTPSPLSSLLPPPPPVATATATTVPATLAATTAAAATSFSTSAITISTSATPTNTTNNTFANEDSHRKCHRTRVEKVETPHVTIEDAQHRKPMDQKRSSSLGSNRSNRSHTSGRLRSPSNDSAHRSGDDQSGRKRVLHSGSRDREKTKSLEITGERKSRIDQLKRGEPSRSTSSDRQDSRSHSSRRSSPESDRQVHSRSGSFDSRDRLQERDRYEHDRERERERRDTRQREWDRDADKDWPRNRDRDRLRERERERERDKRRDLDRERERLISDSVERDRDRDRDRTFESSQIESVKRCEAKLEGEHERDLESTSRDSLALDKERMDKDLGSVQGFEDTNKSERTESLEAGDDESKLDDAHSLGSGAGEGYEPISDDELDEILAGDAEKREDQQDEEKMPDPLDVIDVDWSGLMPKHPKEPREPGAALLKFTPGAVMLRVGISKKLAGSELFAKVKETCQRLLEKPKGSFILL

SEQ ID NO: 3 - DNA, 6429 bp, Homo sapiens
  CDS (70)..(4764)
gagaggaacagggcaaacctctgacttccggcggcattttgaggcggtcctcctagcggcctgtacaaaatgtcaaaaattagaaggaaggtcacagtggaaaataccaagactatatctgatagcacatcccgaagacccagtgtatttgagaggcttggacccagcactggcagtacagcagagacacagtgccgtaactggctgaagactggcaactgcctctatggaaacacatgtagattcgtacatggcccttcacctcgtggtaaaggttatagcagcaattatagaaggtcaccagaaagacctacaggggatcttagagaaagaatgaagaacaagcgccaagacgtggacactgagccccagaaacgaaatacagaggagtcatcctcacctgttaggaaagaatcttcaagagggagacatagggaaaaggaagacataaaaatcactaaggaaagaactccagaaagtgaagaagaaaatgtagaatgggaaactaatagagatgattctgacaatggagatattaattatgattatgttcatgaattgtcattggaaatgaagcgtcagaagatacagagggaattaatgaagctggaacaagaaaacatggagaagagagaagaaattatcattaaaaaggaggtttcaccagaagtggttagatcaaaattgtccccgtcaccttctctaagaaagtctagcaaatctccgaagcgaaaatcaagcccgaagtcgtcttcagctagcaagaaagataggaagacatctgcagtatcttctcccctgttggaccagcagagaaattcaaaaaccaaccaaagtaaaaagaaaggaccacgtactcctagtccaccccctcctataccagaagatatcgctctggggaaaaaatacaaagaaaaatataaagtaaaagacaggatagaagaaaaaacaagagatggaaaggacagaggacgagattttgaacgacaaagagaaaagagagacaagccaaggtctacttccccagcaggacagcatcattctcctatatcttctagacatcactcatcttcctcacaatcaggatcatctattcaaagacattctccttctcctcgtcgaaaaagaactccttcaccatcttatcagcggacactaactccacctttacgacgctctgcctctccttatccttcacattctttgtcgtctccccagagaaagcagagtcctccaagacatcgctctccaatgcgagagaaagggagacatgatcatgaacgaacttcacagtctcatgatcgacgccacgaaaggagggaagatactaggggcaaacgagacagagaaaaggactcaagagaagaacgagaatatgaacaggatcagagctcttctagagaccacagagatgacagagaacctcgagatggtcgggatcggagagatgccagagatactagggaccgaagggaactaagagactccagagacatgcgggactcaagggagatgagagattatagcagagataccaaagagagccgtgatcccagagattctcggtccactcgtgatgcccatgactacagggaccgtgaaggtcgagatactcatcgaaaggaggatacatatccagaagaatcccggagttatggccgaaaccatttgagagaagaaagttctcgtacggaaataaggaatgagtccagaaatgagtctcgaagtgaaattagaaatgaccgaatgggccgaagtagggggagggttcctgagttacctgaaaagggaagtcgaggctcaagaggttctcaaattgatagtcacagtagtaatagcaactatcatgacagctgggaaactcgaagtagctatcctgaaagagatagatatcctgaaagagacaacagagatcaagcaagggattcttcctttgagagaagacatggagagcgagaccgtcgtgacaacagagagagagatcaaagaccaagctcaccaattcgacatcagggaaggaatgacgagcttgagcgtgatgaaagaagagaggaacgaagagtagacagagtggatgataggagagatgaaagggctagagagagagatcgggaacgagaacgagacagggagcgggagagagagagggaacgtgaacgggatcgggaaagagaaaaagagagagaactagaaagagagcgtgctagggaacgggagagagaaagagaaaaagagagagatcgtgaaagggatagagaccgagaccacgatcgagagcgggaaagagagagggaacgagacagggaaaaagaacgggaacgagaaagagaagagagagagagggagagagagcgagaacgggagagagagcgagagcgagaacgggaacgagaaagagcgagagaaagggataaagaacgagaacgccaaagggattgggaagacaaagacaaaggacgagatgaccgcagagaaaagcgagaagagatccgagaagataggaatccaagagatggacatgatgaaagaaaatcaaagaagcgctatagaaatgaagggagtcccagccctagacagtccccgaagcgccggcgtgaacattctccggacagtgatgcctacaacagtggagatgataaaaatgaaaaacacagactcttgagccaagttgtacgacctcaagaatctcgttctcttagtccctcgcacctcacagaagacagacagggtagatggaaagaggaggatcgtaaaccagaaaggaaagagagttcaaggcgctacgaagaacaggaactcaaggagaaagtttcttctgtagataaacagagagaacagacagaaatcctggaaagctcaagaatgcgtgcacaggacattataggacaccaccagtctgaagatcgagagacatctgatcgagctcatgatgaaaacaagaagaaagcaaaaattcaaaagaaaccaattaagaaaaagaaagaggatgatgttggaatagagaggggtaacatagagacaacatctgaagatggtcaagtattttcaccaaaaaaaggacagaaaaagaaaagcattgaaaaaaaacgtaaaaaatccaaaggtgattctgatatttctgatgaagaagcagcccagcaaagtaagaagaaaagaggcccacggactccccctataacaactaaagaggaattggttgaaatgtgcaatggtaagaatggtattctagaggactcccagaaaaaagaagatacagcattcagtgactggtctgatgaggatgtccctgaccgtacagaggtgacagaagcagagcatactgccaccgccacgactcctggtagtaccccttctcctctatcttctcttcttcctcctccaccgcctgtggctactgccactgctacaactgtgcctgcaactcttgctgccactactgctgctgccgccacctctttcagcacatctgccatcactatttccacctctgccacccccaccaataccaccaataatacttttgccaatgaagactcacacagaaaatgccacagaacacgagtagaaaaagtagagacgcctcacgtgactatagaagatgcacagcatcgcaagcctatggatcaaaagaggagcagcagcctcgggagcaatcggagtaaccgtagtcatacgtctggtcgtcttcgctccccatccaatgattcagcccatcgaagtggagatgaccaaagtggtcgaaagagagtactgcacagtggctcaagagatagagaaaaaacaaaaagcctggaaatcacaggagagagaaaatctaggattgatcagttaaagcgtggagaacccagtcgaagtacttcttcagatcgccaggattcaagaagccatagttcaagaagaagttctccagagtcagatcgacaggtccattcaagatctgggtcatttgatagcagagacaggcttcaagaacgagatcgatatgaacacgacagagagcgcgagagagagaggagagatacgaggcagagagaatgggaccgagatgctgataaagattggccacgcaacagggatcgagatagattgcgagaacgagaacgagagagagaacgagacaaaaggagagacttggatagggaaagagagagactaatttctgattctgttgaaagggacagggacagagacagagacagaacttttgagagttctcaaatagagtctgtgaaacgctgtgaagcaaaactggaaggtgaacatgaaagggatctagaaagcacttcccgagactctctagccttggataaagagagaatggataaagatctgggatctgtgcagggatttgaagatacaaataaatccgagagaactgagagtctggaagcaggagatgacgagtccaagttagatgatgcacattcattaggctctggtgctggagaaggatacgagccaatcagtgatgacgaactagatgaaattctggcaggtgatgcagaaaagagggaggaccaacaggatgaggagaagatgccagatcccttagatgtgatagatgtggattggtctggtcttatgccaaagcatccaaaagaaccacgagagcctggggctgcactcttaaaattcacacctggagctgttatgctaagagttgggatttctaaaaagttggcaggttctgaactctttgccaaagtcaaagaaacatgtcagagacttttagaaaaacccaaaggtagtttcattttactttaactatataatgtctgttaaccatttaagatgccatctgaaggggattctgatctgttcttatgtagcacttaacactgtgtagaaactattttttgagaaatcattttataatcattatttaaccctcatggtcaaagtttctctttaaaatttattttgagaagaagagttatcccacagaaaagttgggaaaagagtacaatgacctttttgtatgaaaattacttattaacaggccaggcgtggtgttgcatgtctgtagtcacagctactcagggaggttgaggcagcaggattgctggagcccaggaaattgaggctgcagtgagccatgattgagccaccacactccaacctaggtgacagagcaagaccctgtctcaaaaaaaaaaaaacaaattaaccaataagttctaatatcaaagtgctcagtggtttgcccttggctaaatgaagcagagccaggaaaaacagactacatatttttcatgtctaaagaaattgggtattttggcagccctttcccctagacatctacccaaatgcaggtgtgtaggttgagtctttaacaaagtgattaagagcttggtctgtaaggccggatgatctggatttcagtaggcacaccacttactggctattacttaatctgtgtgttagtgtcatcatctgtaagtcaggaataatcataccaccaacttcctatggtaattaggagcaaatgagttattacaggcaaaacacttagaacagttcctggcatatagtaatacccaataaatattaactgctactttgaaaatatcctatcacgctgatttttgacctcactgcagcaattttcagttattccagattatctagcttatggattctggtggtaggggttgtttggttttggttttcactgtctctgtctcatctagtacctaccttagtttattttgcaacttactaatactttattaatggggagggacgagtagatggtaaaaagaaggaaaaggaggtaaaaggtgaaaggaacaacattaattaacaattttacgtcatgtccctggacataaaagtttagttagtattaaatttttcactaatacaaaataaaaaaatattgttttatgagttttatgaattcatgcccttcctttactctattagcataagcagtaaatttttttattttaatatagcccaataaacctagagtatacatgtacaaaatacatataattgttaacgtgtattaaccgaaaaatgacccaagacttagttcttgccctactgtatctgccttgtttggttggttctgtgaccttaagcaaataactcctgtgagcctcaattttatttgtaaagtgatggaataaaacccctaaaatcttacccacctctaaagatatttgtttctgtgaccttttgctagtagcatttcaagttaaaatctggtttgattttgctacccatgaaatacagttcggcccttacttattgatgacttaacctaaacagtgaaaatatgcactgtaaagggtggggtgatgtggcttaacaatcagacttcttctatttttgctgctatggtggttgtattagagaactgatgtattatcttgaataaagactttgtcttgtttactgccctaaaaaaaaaaaaaaaaaaaa

SEQ ID NO: 4 - protein, 1564 aa, Homo sapiens; identical to SEQ ID NO: 2

SEQ ID NO: 5 - DNA, 6164 bp, Homo sapiens
  CDS (314)..(2398)
gtaaaactttggacaatacttattactttattgactgtgttagtttcttcttcttaagtagactgttgtcatctcttttcttttgagtccaattttcctatagtttgtttatgtcaatggctcgacaaaatgataaaatatatttccagaaagcacatggatttggaactctctcttgttatgtttatattaggctttattttaaaggcaagtgagactgcttcaaataaaacaacttcaagcttccaagaaacagttaagaggaggcagagaggagcagaaacacttctttgctgacacttacactgttgccatggacctacataagcagtgggagaacacagagactaactggcataaggaaaagatggaattactggaccagtttgacaatgaaagaaaggaatgggaaagtcaatggaagattatgcagaagaaaatagaagagctttgccgggaagtaaagctttggaggaaaatcaatatcaatgaaagtgctaagatcattgatctttaccatgagaagaccattccagagaaagtgatagaatcttccccaaattaccccgatttaggacaaagtgaatttataaggacgaatcacaaagatggtctgagaaaagaaaataaaagagagcagagcttagtcagtggaggaaatcaaatgtgtaaggaacaaaaagcaacaaaaaaatcaaaagtagggtttttggatcctttggctacagacaaccaaaaggaatgtgaggcctggcctgacctgaggacttctgaggaagacagcaagagctgttctggcgccctcagtacagctcttgaagaacttgcgaaggtgagtgaagaattatgcagctttcaagaggaaattcgaaagcggtctaaccatagaaggatgaagtcagattcttttctccaggaaatgccaaatgtaactaatatacctcatggggaccccatgatcaacaatgaccagtgcattcttccaatcagtttagaaaaagaaaaacagaaaaacaggaagaatctgagctgtaccaatgtgctccagagcaattctacgaaaaaatgtggaattgatacaatcgatttaaaaagaaatgaaactccaccagttcctcctccaagaagcacctctcgaaattttcccagctcggattctgaacaagcctatgaaagatggaaggaaaggttagaccacaacagctgggtgccccatgagggtcgaagtaaaaggaattacaaccctcacttccctttgagacaacaagagatgtctatgttgtatccaaatgaagggaaaacttcgaaagatggtatcatcttttcctctttggtaccagaagtcaaaatagatagcaagcctccaagtaatgaagatgttggacttagcatgtggtcatgtgacattgggataggtgcaaaaaggagcccctctacttcgtggtttcagaaaacctgctctacccccagtaatccaaaatatgaaatggtgatcccagatcaccctgctaaatctcatcctgatcttcatgtaagtaatgactgtagctcctcagtagcagagagcagtagcccacttagaaatttcagttgtggctttgaaaggactacaaggaatgagaagctggcagcaaagactgatgaatttaacagaactgtatttagaacagatagaaattgtcaggcaatacagcaaaatcacagctgctcaaaatcatcggaggatctcaagccctgtgatacctcatctactcacacaggtagcatatcacaaagtaacgatgtgtccggtatttggaaaaccaatgcccacatgcctgtgcccatggaaaatgtgcctgataatcccaccaagaaatccacaacaggcctagtaagacaaatgcagggacacctaagtcctcgcagttatcgaaatatgctccacgagcatgactggagaccgagtaatttgtctggccgtccgaggtcagctgatcccaggtcaaattatggtgttgtggaaaagctgctgaaaacctatgagacagcaacagagtctgcattgcaaaattctaagtgcttccaggataattggaccaaatgtaattctgatgtcagtggtggtgccacattaagtcagcatttagaaatgctccaaatggaacaacagtttcagcaaaagacagctgtgtgggggggacaggaagtgaagcaaggaatagatccgaaaaagataacagaggaatccatgtcagtgaacgcctcacatggaaaaggattttcccgacctgctagaccagcaaatcgtcgtctcccctccagatgggcatccagatctccatctgcaccccctgccttgcggagaactacccacaactataccatttctctgcgatccgaagcattgatggtttaagtctttggcctggattgctatattacagaagttctagtcccacttgtcaaacagagcattctgagtgtttacaggcggacctgttctcttccgacaagcaatttgaatcttaactttccatcagtcttcagtgtttttaatctaaggaataattatcttcctgcattttgatttcttagatcagaattttttaatgccatcctcattagttttccaatacaatataagttgaaacaatgtacaatattgtatattctttgttgcaagtggcagaaagtaaggttatgtgcatggccatgtgtttgtaggtgcatgtgttgaaataggaagtatcctagtatgtatttagatatgaaaaacttatgtgctagtgttgactttgaaattataacatgtatacctatatattctttgtgtttatttaaaagttttgaaaatatgcagtactgtttatattttgtataccttttaataggtatccacttaaggcatttgcagtacaaatattaattgaccacttccttggcccccagctacaatgaaaaagaagaattatgcacacatctaacattggtagatttctaaagacaactcataaataatttcttaacccatataaggataaaataataccattgatattcttgtttattctttttaaataaaaatgtcacaagtttaatagatcagccttgtaaagcaagcataaaatgttcataaatgttttatatattatttggtagtctagtatggctttaactgaatatttgatcctcagagacagtatcatgagactgcattataaatgacatgattaaatgatgaatttattttgtcagcctcagcaacaaacatttcctaaatgggatgcaaaaagaaactgaatgatgttgaattttagtttttctttaagttgtggtaagcttttagtttagctgctttaacatggagtcatacatacttagaggtaagtcatttattatttttttcctttttctaatcttttccttaaaattaatagataacaaactaagttacttttttactaacaaggaagatcaggaataatatttctttgaaagctgaaattatacttctcacagtttgctaccgaaaaaaggcttaaactaaaccttgacatccacagtagcatcaggaatagaaatgtgtattttggctacagtttgcatacagtgaacacataaaatctatattgaaaactgacagaaatatgaatgtcgaggggcttggaattctaaatggaagattttagaaggaactttgctctctactgtcactatataaaaccaattatgttatgttattagatattaactctatttaagcttttcttttactaagaaattcttatgccaaatgtattccaagagccatctccttatgatgtatttgaaccatttagagaaattcacttcattgtaccccatgacctgaggtaaagaaaataattttcaaattgcagacttccttgaaaggctcaagactgtagcatggtgatgtctagattcatactttactgtaaggacagtttcggtagttaagtggaattaaaggtctagagtgatttgtattggatggtaactaaggtctatacatctactcttttaattcttatttccttcaggaagatccttttccacaggaagctatcaaagaaaagtaaactagacaccaagtaatatcactctcataatatgctttccagctagaggggagaaaacaccaggaaagaggaaccctgggtcataaaatgacggacctgttaggaaaatgctgttgtgtgacaatggagagcctgcccaaggactgtgcaacctatctgttcctctccaccagtgtatcccaagtagtctggtatgatctgtggttccttagaatattgaggatctctttaaaaaatgaaatttctgatctcaccccatattactaaagcaaaatttccaggggtagggactgggactccagaaccattaataaaacaaaacaaaacaaagcaaaatattgatgatcaggcagatttgaaaacagtgacattgcttgatctctgaatggatggatgcccttgggtggtcacttttcttcctaggacttgcctttgttatctgtaaattagaatggctatactttcagacttcacaattttaagccacttttttctattaacagttgaatgaaccagtgggacacattttaacgtcttcttatgttgactaaaattatagttagagctgagaaaaaaaaaatagcatctagtccaactccttgattgtaaaactgaaaaactaaggttatttgaatgttctgttttctctttttaaatattttataacttttaaatggaaaaacctattaggtaaatggaaataatccttgaaaatagtttttgatgttttgtgatttttaactggtaaatttctactttaggtgggcattttcttccctagaatatgccctttattatgctatcattgctagatttaaagggacttgtaagcatttctggaaatatttgatttaaaaacatatattaatagatgttttccctagcagacttttggagcaaaaatattattttagttcagcagaggattactgatattatgggctgatctcagaaaggaataaggatgaggcagagaggagtacttgagtttgtgtgtgtgtgtgtgtgtgtgtgtttgtgtcagtgtcacataagttctccatattgccttatgtcccaaagccaaatataaaaatataaatgatgctttgtataattcattttatcaaaaattacccataactttcatttgtttttatatcgacaatgaagatgatcatatttcattttgcagatgtggccataaaatattatttacttctatataggtgattttaccaggtttagttatcctgagaaaacatctggacttaagagtttctgcttccctacaaagatctttaaagttatttttaggcacatttgtgacaaacaactacttgatattgaaatctccttcagccattagaagctatcaaataaagtaggtgtaaaaacaactgtctgtggcatttgtatacatcgagaacatttttctttccctcattttctgcagtgaactccagtaaagctaagtgtcttatgaaatctaaactcatatatgtacacagttcactctagcttcttccaaaatatctctaggtagtacaactgaagccaaacctgcctgacttcctgctcctggccacccaaaactccatatggcttctcgtacactgacatcctctctctacccatttaactgctaattgagtctgataaaagtcttctttgaaaaaagtttttacttctaagatttgcatttacatcataaaattaaaccattttcaggaaaatcagatttttttattacagtactatttgctttaaattcggcatgtttttcttaagtagcaagtacatgtatcggaacttagaactggtgggcgcggtggctcttgcctgtaatcccagcactttgggaggccaaggtggggggatcacgaggtcaggagatggagaccatcctggtttcatcacggtgaaaccccctctctgctaaaaatacaaaaaattagccaggcattgtggtggtcacctgtagtcccagctgctcgggaggctgaggcaggagaatggcatgaacccgggaggcagagcttgcagtgagcagagatcgcgccactgcactccagcctgggtgacagagtgagactctgtctc

SEQ ID NO: 6 - protein, 694 aa, Homo sapiens
MDLHKQWENTETNWHKEKMELLDQFDNERKEWESQWKIMQKKIEELCREVKLWRKININESAKIIDLYHEKTIPEKVIESSPNYPDLGQSEFIRTNHKDGLRKENKREQSLVSGGNQMCKEQKATKKSKVGFLDPLATDNQKECEAWPDLRTSEEDSKSCSGALSTALEELAKVSEELCSFQEEIRKRSNHRRMKSDSFLQEMPNVTNIPHGDPMINNDQCILPISLEKEKQKNRKNLSCTNVLQSNSTKKCGIDTIDLKRNETPPVPPPRSTSRNFPSSDSEQAYERWKERLDHNSWVPHEGRSKRNYNPHFPLRQQEMSMLYPNEGKTSKDGIIFSSLVPEVKIDSKPPSNEDVGLSMWSCDIGIGAKRSPSTSWFQKTCSTPSNPKYEMVIPDHPAKSHPDLHVSNDCSSSVAESSSPLRNFSCGFERTTRNEKLAAKTDEFNRTVFRTDRNCQAIQQNHSCSKSSEDLKPCDTSSTHTGSISQSNDVSGIWKTNAHMPVPMENVPDNPTKKSTTGLVRQMQGHLSPRSYRNMLHEHDWRPSNLSGRPRSADPRSNYGVVEKLLKTYETATESALQNSKCFQDNWTKCNSDVSGGATLSQHLEMLQMEQQFQQKTAVWGGQEVKQGIDPKKITEESMSVNASHGKGFSRPARPANRRLPSRWASRSPSAPPALRRTTHNYTISLRSEALMV

SEQ ID NO: 7 - DNA, 7014 bp, Homo sapiens
  CDS (1164)..(3248)
agcagaacaagcgcatcacggcggagctcaacaagtacaagtacaagtccggcggccacgacagcgcgcggcaccacgacaacgccaagaccgaggccctgcaggaggagctgaaggcggcgcgcctgcagatcaacgagctcagcggcaaggtcatgcagctgcagtacgagaaccgcgtgcttatgtccaacatgcagcgctacgacctggcctcgcacctgggcatccgcggcagcccccgcgacagcgacgccgagagcgacgcgggcaagaaggagagcgacgacgactcgcggcctccgcaccgcaagcgcgaagggcccatcggcggcgagagcgactcggaggaggtgcgcaacatccgctgcctcacgcccactcgctccttctacccggcgcccgggccctggcccaagagcttctccgatcggcagcagatgaaggacatccgctcggaggccgagcgcctgggcaagaccatcgaccggctcatcgccgacacgagcaccatcatcaccgaggcgcgcatctacgtggccaacggggacctgttcggactcatggacgaggaggacgacggcagccgcatccgggagcacgagctgctctaccgcatcaacgctcagatgaaggccttccgcaaggagctgcagaccttcatcgaccgcctcgaggtgcccaagtctgcggacgaccgcggcgccgaggagcccatttccgtgagtcagatgttccagcctatcattttacttattctcattcttgtattattttcatcactttcttacacaacaatatttaaacttgtcttcctttttacactgttttttgtactgtaaatctttcatcatttaccattcattgtagtattttcagtttgtttattttgttcacccttcaagacaagaagtaaaagaagtataatttctgtagtaaccaatgctataaaaacactgaagactgcttatttctttaaaaagatacaactcatcttaccaagaccaaattcaataagaagcccaaacactaaaatatttcaggctttattttaaaggcaagtgagactgcttcaaataaaacaacttcaagcttccaagaaacagttaagaggaggcagagaggagcagaaacacttctttgctgacacttacactgttgccatggacctacataagcagtgggagaacacagagactaactggcataaggaaaagatggaattactggaccagtttgacaatgaaagaaaggaatgggaaagtcaatggaagattatgcagaagaaaatagaagagctttgccgggaagtaaagctttggaggaaaatcaatatcaatgaaagtgctaagatcattgatctttaccatgagaagaccattccagagaaagtgatagaatcttccccaaattaccccgatttaggacaaagtgaatttataaggacgaatcacaaagatggtctgagaaaagaaaataaaagagagcagagcttagtcagtggaggaaatcaaatgtgtaaggaacaaaaagcaacaaaaaaatcaaaagtagggtttttggatcctttggctacagacaaccaaaaggaatgtgaggcctggcctgacctgaggacttctgaggaagacagcaagagctgttctggcgccctcagtacagctcttgaagaacttgcgaaggtgagtgaagaattatgcagctttcaagaggaaattcgaaagcggtctaaccatagaaggatgaagtcagattcttttctccaggaaatgccaaatgtaactaatatacctcatggggaccccatgatcaacaatgaccagtgcattcttccaatcagtttagaaaaagaaaaacagaaaaacaggaagaatctgagctgtaccaatgtgctccagagcaattctacgaaaaaatgtggaattgatacaatcgatttaaaaagaaatgaaactccaccagttcctcctccaagaagcacctctcgaaattttcccagctcggattctgaacaagcctatgaaagatggaaggaaaggttagaccacaacagctgggtgccccatgagggtcgaagtaaaaggaattacaaccctcacttccctttgagacaacaagagatgtctatgttgtatccaaatgaagggaaaacttcgaaagatggtatcatcttttcctctttggtaccagaagtcaaaatagatagcaagcctccaagtaatgaagatgttggacttagcatgtggtcatgtgacattgggataggtgcaaaaaggagcccctctacttcgtggtttcagaaaacctgctctacccccagtaatccaaaatatgaaatggtgatcccagatcaccctgctaaatctcatcctgatcttcatgtaagtaatgactgtagctcctcagtagcagagagcagtagcccacttagaaatttcagttgtggctttgaaaggactacaaggaatgagaagctggcagcaaagactgatgaatttaacagaactgtatttagaacagatagaaattgtcaggcaatacagcaaaatcacagctgctcaaaatcatcggaggatctcaagccctgtgatacctcatctactcacacaggtagcatatcacaaagtaacgatgtgtccggtatttggaaaaccaatgcccacatgcctgtgcccatggaaaatgtgcctgataatcccaccaagaaatccacaacaggcctagtaagacaaatgcagggacacctaagtcctcgcagttatcgaaatatgctccacgagcatgactggagaccgagtaatttgtctggccgtccgaggtcagctgatcccaggtcaaattatggtgttgtggaaaagctgctgaaaacctatgagacagcaacagagtctgcattgcaaaattctaagtgcttccaggataattggaccaaatgtaattctgatgtcagtggtggtgccacattaagtcagcatttagaaatgctccaaatggaacaacagtttcagcaaaagacagctgtgtgggggggacaggaagtgaagcaaggaatagatccgaaaaagataacagaggaatccatgtcagtgaacgcctcacatggaaaaggattttcccgacctgctagaccagcaaatcgtcgtctcccctccagatgggcatccagatctccatctgcaccccctgccttgcggagaactacccacaactataccatttctctgcgatccgaagcattgatggtttaagtctttggcctggattgctatattacagaagttctagtcccacttgtcaaacagagcattctgagtgtttacaggcggacctgttctcttccgacaagcaatttgaatcttaactttccatcagtcttcagtgtttttaatctaaggaataattatcttcctgcattttgatttcttagatcagaattttttaatgccatcctcattagttttccaatacaatataagttgaaacaatgtacaatattgtatattctttgttgcaagtggcagaaagtaaggttatgtgcatggccatgtgtttgtaggtgcatgtgttgaaataggaagtatcctagtatgtatttagatatgaaaaacttatgtgctagtgttgactttgaaattataacatgtatacctatatattctttgtgtttatttaaaagttttgaaaatatgcagtactgtttatattttgtataccttttaataggtatccacttaaggcatttgcagtacaaatattaattgaccacttccttggcccccagctacaatgaaaaagaagaattatgcacacatctaacattggtagatttctaaagacaactcataaataatttcttaacccatataaggataaaataataccattgatattcttgtttattctttttaaataaaaatgtcacaagtttaatagatcagccttgtaaagcaagcataaaatgttcataaatgttttatatattatttggtagtctagtatggctttaactgaatatttgatcctcagagacagtatcatgagactgcattataaatgacatgattaaatgatgaatttattttgtcagcctcagcaacaaacatttcctaaatgggatgcaaaaagaaactgaatgatgttgaattttagtttttctttaagttgtggtaagcttttagtttagctgctttaacatggagtcatacatacttagaggtaagtcatttattatttttttcctttttctaatcttttccttaaaattaatagataacaaactaagttacttttttactaacaaggaagatcaggaataatatttctttgaaagctgaaattatacttctcacagtttgctaccgaaaaaaggcttaaactaaaccttgacatccacagtagcatcaggaatagaaatgtgtattttggctacagtttgcatacagtgaacacataaaatctatattgaaaactgacagaaatatgaatgtcgaggggcttggaattctaaatggaagattttagaaggaactttgctctctactgtcactatataaaaccaattatgttatgttattagatattaactctatttaagcttttcttttactaagaaattcttatgccaaatgtattccaagagccatctccttatgatgtatttgaaccatttagagaaattcacttcattgtaccccatgacctgaggtaaagaaaataattttcaaattgcagacttccttgaaaggctcaagactgtagcatggtgatgtctagattcatactttactgtaaggacagtttcggtagttaagtggaattaaaggtctagagtgatttgtattggatggtaactaaggtctatacatctactcttttaattcttatttccttcaggaagatccttttccacaggaagctatcaaagaaaagtaaactagacaccaagtaatatcactctcataatatgctttccagctagaggggagaaaacaccaggaaagaggaaccctgggtcataaaatgacggacctgttaggaaaatgctgttgtgtgacaatggagagcctgcccaaggactgtgcaacctatctgttcctctccaccagtgtatcccaagtagtctggtatgatctgtggttccttagaatattgaggatctctttaaaaaatgaaatttctgatctcaccccatattactaaagcaaaatttccaggggtagggactgggactccagaaccattaataaaacaaaacaaaacaaagcaaaatattgatgatcaggcagatttgaaaacagtgacattgcttgatctctgaatggatggatgcccttgggtggtcacttttcttcctaggacttgcctttgttatctgtaaattagaatggctatactttcagacttcacaattttaagccacttttttctattaacagttgaatgaaccagtgggacacattttaacgtcttcttatgttgactaaaattatagttagagctgagaaaaaaaaaatagcatctagtccaactccttgattgtaaaactgaaaaactaaggttatttgaatgttctgttttctctttttaaatattttataacttttaaatggaaaaacctattaggtaaatggaaataatccttgaaaatagtttttgatgttttgtgatttttaactggtaaatttctactttaggtgggcattttcttccctagaatatgccctttattatgctatcattgctagatttaaagggacttgtaagcatttctggaaatatttgatttaaaaacatatattaatagatgttttccctagcagacttttggagcaaaaatattattttagttcagcagaggattactgatattatgggctgatctcagaaaggaataaggatgaggcagagaggagtacttgagtttgtgtgtgtgtgtgtgtgtgtgtgtttgtgtcagtgtcacataagttctccatattgccttatgtcccaaagccaaatataaaaatataaatgatgctttgtataattcattttatcaaaaattacccataactttcatttgtttttatatcgacaatgaagatgatcatatttcattttgcagatgtggccataaaatattatttacttctatataggtgattttaccaggtttagttatcctgagaaaacatctggacttaagagtttctgcttccctacaaagatctttaaagttatttttaggcacatttgtgacaaacaactacttgatattgaaatctccttcagccattagaagctatcaaataaagtaggtgtaaaaacaactgtctgtggcatttgtatacatcgagaacatttttctttccctcattttctgcagtgaactccagtaaagctaagtgtcttatgaaatctaaactcatatatgtacacagttcactctagcttcttccaaaatatctctaggtagtacaactgaagccaaacctgcctgacttcctgctcctggccacccaaaactccatatggcttctcgtacactgacatcctctctctacccatttaactgctaattgagtctgataaaagtcttctttgaaaaaagtttttacttctaagatttgcatttacatcataaaattaaaccattttcaggaaaatcagatttttttattacagtactatttgctttaaattcggcatgtttttcttaagtagcaagtacatgtatcggaacttagaactggtgggcgcggtggctcttgcctgtaatcccagcactttgggaggccaaggtggggggatcacgaggtcaggagatggagaccatcctggtttcatcacggtgaaaccccctctctgctaaaaatacaaaaaattagccaggcattgtggtggtcacctgtagtcccagctgctcgggaggctgaggcaggagaatggcatgaacccgggaggcagagcttgcagtgagcagagatcgcgccactgcactccagcctgggtgacagagtgagactctgtctc

SEQ ID NO: 8 - protein, 694 aa, Homo sapiens; identical to SEQ ID NO: 6

SEQ ID NO: 9 - DNA, 4891 bp, Homo sapiens
  CDS (202)..(1041)
gtgtgacgaaacctgcttcggcggcccgaggtgggggttttgagtcggttagtggaggcagtgggagcaggatgggcggagcttctgttccaaaaatttcccctaagtgcggttgacagtgtgcaggcaggcgggggtgcgcggggcggtcagcgatctgcagcttcgcggggacagagatgtaacccaactcgttcacggatgttccgcgcgccgtgtcaccggctgcgggccaggggtactcggaaggcgcgggcaggagcctggcgaggatgcaccttcccctgccttggaaagggaatggagaggccggcggcccgggagccgcatgggcccgacgcgctgcggcgcttccagggactgctgctggaccgccgaggccggctgcaccgccaggtgctgcgcctgcgcgaggtggcccggcgcctggagcgcctgcgcaggcgctccctcgtagccaacgtggccggcagctcgctgagcgcaacgggcgccctcgccgccatcgtggggctctcgctcagcccggtcaccctggggacctcgctgctggtgtcggccgtggggctgggggtggccacagccggaggggccgtcaccatcacgtccgatctctcgctgatcttctgcaactcccgggagctgcggagggtgcaggagatcgcggccacctgccaggaccagatgcgagagatcctgagctgcctcgagtttttctgccgctggcagggctgcggggaccgccagctgctgcagtgcgggaggaacgcctccatcgccctgtacaattctgtctacttcatcgtcttctttggctcacgtggcttcctcatccccaggcgggcggagggggacaccaaggttagccaggccgtgctgaaggccaagattcagaaactggccgagagcctggagtcctgcaccggggctctggacgaactcagcgagcagctggagtctcgggttcagctctgcaccaagtccagtcgtggccacgacctcaagatctctgctgaccagcgtgcagggctgtttttctgagaacatcctttccccctaatgaccgaggccagcaaatcatcctcatgggatgctccagaatttgtagctcccttaggaaaacaccaagctgggttaggagccgaaggcaaaggatgagaaaaactgtttttgaagtgggcaggtccccaaagcccttcttttcccatcactgtgacatctgcctgggcttgagtgctacggacttttcagtcttcctagtggaaaaatgtgacccaaaaactccttttcctttatcaaaaactttctgtctaaacacagctgggcaggcactcctgttttaaagttatttcggggtccctgaccctgccctggtggcttggcctgagactggagagagtgccatcctctgggtcctctccaagtcctactagtctttgaagtcctcaaaatgtgcgtgaggaaggcatttgcctctattccagaatttctgatacaaagaactccagaatccagagcaaatcagcccttctctgaacgttgtaggatggttcagaacccagagaggaccctggtgctgatatctcctcctcttccctttcccctcagcttacttactcccagatgcggcctgggtatgaagtaggcctttcctgagtggctcccaatccagtcctccaagtactcagaggggaagcccgtgaagccgtcatctaagtcctgctccctcacatgaagctgagggccagatagatggagcgactgccaacttcatttcccgacatcattgtgttcagaagagagtgatgggttttgagttagacagtcctgggcttgagacaggctttgtcactactgtgtgagtgtagccacctaatctctctgagactgtgtaaaacaaagatgataaaatctcaccctgttgtgagatattaaatgagccaaagtgcctagcatgatggtgctggctcatatagtgtagtccctggaatggcaaattaacatcacccaggaacttgttagaaaggcaaattcttggacacaaccctcctgatttatggaatcagaaactctggctgtggggcccagcaacctgagtttaaacaatttctctgggtggttctgcggcacactaaggtttgaaaatcactacaacaaatgctaacttctaatccccttgatgagctttcacgaagtctcacggcttctctagggactccatggtcttcagagtcgttcacagatgaccaaggacagactgtgtcccagaagccaaaatgagagagagagagagagcacgcgtacgtgcaccctggggcagtgtctcaccgtatgaataagggatgtaacactaaaagcccattagggggcagtgtttcccgcctgttgtagaaactggtacagaaaggatcctatatgaagttcctgaaactgacctttgtctattattaccttctctgaaaagtgccagtccatgtattttttatttattttaagtttgtaatttaatttttaattattgtttagtgtttgcatttaattttatttaatcaccacatttagaaaataataagagcaagtttctaaatgggagactgctgaggctctttgcaagagatgagattaagtttgagtttctaaggcagggcatgagctggaaatagcattgctttccttgattgtctctctccttcagggagattctttttctctagtgttttaagtgatcctttgaagtaagtgtggagagtcttgaatggcaagaccaggagctgagtttaagcttgtaatggaagcttgcattgtgggatatataactgaggaagcatatttatcctgaaggtattttgccagaaggtatcacttgacctggaaaaggaatctatttagttcaggaaagataaaaagtttagaggtatgtgaaggaagcacttagaacttgcaagcctgatgtcctatcaagttatgtcttctgggtgacagacaaaatagcttgtcttatggtggtgatgtgttgcattttcactttggggtctgtaagaaactgtcagtgaaaatatgtacaattccttcaatttccattcttaacaactgtaatgttgaaaaataagttgaaaagtctttgggaccatacatgcaaaaacggtgcctctgttacttaattatttaatattctataaatgtacccaatctgtccgcacccttcccagtgatggggcagtatgtctgaggaagtataatttcagtactggggtcggggagaggaggtgatgtttctacatttttattttttctataaattgcaattggtctgtatgctggtttattttgaaatttatattggtttcttttcaagctggtgtcatctcctagactgtttcacccagatgctagcattttttttttttttgagacagagtctcactctgtcacctaggctggagttgcagtggtttgatctcggctcactgcaacctccgactcctgggttcaagcaattcttctgcctcagcctcctgagtagctgggattacagatgtgcaccagcacacccggctaattttttgtatttttagtagagacagggtttcgccatgttggccaggctggtcttgaactcctggccttatgtgatccgcccaccttggcttcccaaagtgctgggattacaggcatgagccacctcgcctggccagatgctagcattttagatcaaacaattcattttagatgaattgttttgtttcacaatcattttaaatcattttagaatgtacttcacattattagttgtgttatggcataaaggtacaaccattccctaactccatcttttattaatgcttaagtttaaattatattcttccaatgcctaagctattccctagaattaaactgggcacttttggaagcagcaacagtaacagcagcagcaaacttttcctctcatattttgggtgtatcaaaagttctagacttttgaagttatgatttcagtggcccactttatttctaaggaagagtgtctactttggaacgatactttgcacatagtaggaactcaagaaatacatttgaataattataattaactgtttagctatcttaatgagaatttgttgacaacaaaagatcatccatcgccttatgtgtgagtaagattggagcctctatcaagatttagtcaagttcagttagattgattctagaaacaaatatttatttctttcttttacggggatgtgaataaggcttttccttaaggccttcattctttaaacaaacaggttgaaatggtatgttgtaaaagagaagacgggagagaggtatttagatgataagtgtacttcacaaaaatgccaaagtttgaaaaataggtatgtttgttctaaatgtttaagtgcttctctgttaggttctggggcttgcaatcatttgaattgttctgtttcacaataaaggagattcactgggttctgcattttcaggattcaatagaactgctccattaaaaaaataatccttagcaagcattcgaatcctaactgctttgatgcacttgccctcgggcacctgtcatttccaatatggtaggtgtcaaagtcaaaagtatttactgggagaaaaaagagaggagtggttgtagaagtctccctaaatcagacatgtcaagcaatcagccaacgtggtgtatttctcattcaatattttagtgtgaattgagacactgagataaagacatcgtgcagagataaatggggatacagttaaatgtagcaactcttgagttcattttttcccactgtagcaaaattaatgctttctctttattgaaataaattgctcattcctccaaaaaaaaaaaaaaaaaaaaaaaaaaaaaaaaaaaagg

SEQ ID NO: 10 - protein, 279 aa, Homo sapiens
MFRAPCHRLRARGTRKARAGAWRGCTFPCLGKGMERPAAREPHGPDALRRFQGLLLDRRGRLHRQVLRLREVARRLERLRRRSLVANVAGSSLSATGALAAIVGLSLSPVTLGTSLLVSAVGLGVATAGGAVTITSDLSLIFCNSRELRRVQEIAATCQDQMREILSCLEFFCRWQGCGDRQLLQCGRNASIALYNSVYFIVFFGSRGFLIPRRAEGDTKVSQAVLKAKIQKLAESLESCTGALDELSEQLESRVQLCTKSSRGHDLKISADQRAGLFF

SEQ ID NO: 11 - DNA, 8733 bp, Homo sapiens
  CDS (473)..(8566)
agagacggaacgagagagagacacacacagggctccttccccccgccctcccccccctccctccgtcggtaccgactcacccgacaccaccaagccgcagggagggacgcccccgccgacaggagaattggttcccgggtccgcggcgatgcccccccggtagctcgggcccgtggtcgggtgtttgtgagtgtttctatgtgggagaaggaggaggaggaggaagaagaagcaacgatttgtcttctcggctggtctccccccggctctacatgttccccgcactgaggagacggaagaggagccgtagccaccccccctcccggcccggattatagtctctcgccacagcggcctcggcctccccttggattcagacgccgattcgcccagtgtttgggaaatgggaagtaatgacagctggcacctgaactaagtacttttataggcaacaccattccagaaattcaggatgaatggggatatgccccatgtccccattactactcttgcggggattgctagtctcacagacctcctgaaccagctgcctcttccatctcctttacctgctacaactacaaagagccttctctttaatgcacgaatagcagaagaggtgaactgccttttggcttgtagggatgacaatttggtttcacagcttgtccatagcctcaaccaggtatcaacagatcacatagagttgaaagataaccttggcagtgatgacccagaaggtgacataccagtcttgttgcaggccgtcctggcaaggagtcctaatgttttcagggagaaaagcatgcagaacagatatgtacaaagtggaatgatgatgtctcagtataaactttctcagaattccatgcacagtagtcctgcatcttccaattatcaacaaaccactatctcacatagcccctccagccggtttgtgccaccacagacaagctctgggaacagatttatgccacagcaaaatagcccagtgcctagtccatacgccccacaaagccctgcaggatacatgccatattcccatccttcaagttacacaacacatccacagatgcaacaagcatcggtatcaagtcccattgttgcaggtggtttgagaaacatacatgataataaagtttctggtccgttgtctggcaattcagctaatcatcatgctgataatcctagacatggttcaagtgaggactacctacacatggtgcacaggctaagtagtgacgatggagattcttcaacaatgaggaatgctgcatcttttcccttgagatctccacagccagtatgctcccctgctggaagtgaaggaactcctaaaggctcaagaccacctttaatcctacaatctcagtctctaccttgttcatcacctcgagatgttccaccagatatcttgctagattctccagaaagaaaacaaaagaagcagaagaaaatgaaattaggcaaggatgaaaaagagcagagtgagaaagcggcaatgtatgatataattagttctccatccaaggactctactaaacttacattaagactttctcgtgtaaggtcttcagacatggaccagcaagaggatatgatttctggtgtggaaaatagcaatgtttcagaaaatgatattccttttaatgtgcagtacccaggacagacttcaaaaacacccattactccacaagatataaaccgcccactaaatgctgctcaatgtttgtcgcagcaagaacaaacagcattccttccagcaaatcaagtgcctgttttacaacagaacacttcagttgctgcaaaacaaccccagacttctgtggtacagaatcaacaacagatatcacaacagggacctatatatgatgaagtggaattggatgcattggctgaaattgagcgaatagagagagaatcagctattgaaagggagcgcttctcaaaagaagttcaagataaagataagcctttgaaaaaaagaaaacaagattcttacccacaggaggctgggggtgctacaggaggtaatagaccagcttctcaggagacgggttctacgggaaatgggtcaaggccagcattaatggttagcattgatcttcatcaggcaggaagagtggactctcaggcttctataactcaggattcagactccataaaaaagcctgaagaaatcaaacaatgtaatgatgcacctgtttctgttcttcaggaagatattgttggaagtcttaaatctacaccagaaaaccatcctgagacacctaaaaaaaagtctgatcctgagctttcaaagagtgaaatgaaacaaagtgaaagtagattagcagaatctaaaccaaatgaaaaccgattggtggagacaaaatcaagtgaaaataagttagaaactaaagttgagacccaaacagaagaacttaaacagaatgagagcagaacaactgaatgcaaacaaaacgagagcaccatagttgagcctaaacaaaatgaaaatagactgtctgacacaaaaccaaatgacaacaaacaaaataatggcagatcagaaacaacaaaatcaaggcctgaaaccccaaagcaaaagggtgaaagccggcctgagactccaaaacaaaagagtgatgggcatcctgaaaccccaaaacagaagggtgatggaaggcctgaaactccaaagcaaaaaggtgagagccgccctgaaactccaaagcaaaaaaatgaagggcgacctgaaacaccaaaacacaggcatgacaataggagggattctggaaagccatctacagagaaaaaacctgaagtgtctaaacataaacaagatactaaatctgactcacctcggttaaaatcagaacgagctgaagccttaaagcagagacctgatgggcgatctgtttctgagtcactaagacgtgaccatgataataaacaaaaatcagatgacaggggtgaatcagagcgacatcgaggggatcagtctagggttcgaagaccagaaacattgagatcctctagtagaaatgaacatggcattaaatctgatagttcaaaaactgataaactagaacgaaaacacaggcatgaatcaggggactcaagggaaagaccatcttctggggaacaaaaatcaagacctgacagtcctcgtgttaaacaaggagattctaataaatcaagatctgataaacttggttttaaatcaccaactagtaaagatgacaaaaggacagagggtaacaagagtaaagtagacactaataaagcacaccctgacaataaggcagaatttccaagttatttgttggggggcaggtctggtgcgttgaaaaattttgtcattccgaaaatcaagagggataaagatggcaatgttactcaggagacaaagaaaatggaaatgaaaggagagccgaaagacaaagtagaaaaaataggattagttgaagatctaaataaaggagctaagcctgtagttgtgctacaaaaactgtctttggatgatgttcagaaacttattaaagatagagaggacaaatcaagaagttcccttaaacctatcaagaataaaccatcaaagtcaaataaaggtagtatagatcaatcagtgttaaaagaattaccccctgaactcctggcagaaattgagtccaccatgccactttgtgaacgtgtgaaaatgaacaaacgcaagcgtagcacagttaatgaaaagccaaaatatgctgaaatcagttcagatgaagataatgatagtgatgaagcttttgaatcctctaggaaacgacataaaaaagatgatgataaagcttgggaatatgaagagcgtgacagaagaagctctggggatcataggagaagtggccactctcatgaaggaagaaggagttcaggtggtggtcgttatcgaaaccgaagtccgtcagattctgacatggaagattattctcctcctcccagccttagtgaggttgctaggaaaatgaagaaaaaagaaaaacagaagaaaaggaaagcatatgaaccaaaactaacacctgaagaaatgatggactcttcaacttttaagagattcacagcctcaatagagaatattttggataatttggaagatatggattttactgcgtttggtgatgatgatgaaattcctcaggaactgctcttaggaaaacatcagcttaatgaacttggcagtgaatctgctaaaataaaagcaatgggtataatggataagctttcaactgacaaaactgtgaaagtcttaaatatcttggagaagaatattcaggatgggtcaaagctttccactttgttaaatcataataacgatactgaagaagaagaaaggttatggagagaccttattatggagagagttacaaaatcagcggatgcttgtcttacaactatcaacattatgacatcccctaacatgccaaaagctgtgtacattgaggatgtaattgaaagagttatacagtacactaaatttcatttgcagaatacactttatcctcagtatgatcctgtttacagattagatcctcatggaggaggcttattaagttcaaaagcaaaacgggctaaatgttctacccataagcagagagtaatagtaatgctttataacaaagtttgtgacattgttagcagcttatcagaattgctagagatacaacttcttacagacacaacaattcttcaggtttcatctatgggaataacaccattttttgtggaaaatgtcagtgaactacagttgtgtgccattaagttagtcactgcagtattctcaagatatgaaaaacataggcagttaattttggaagaaatttttacttcacttgcaagattaccaaccagcaagaggagtttaaggaacttcaggttaaacagtagtgatatggatggagaacctatgtatattcagatggttacagcactggttttacaacttattcagtgtgtggtacacttaccatcatcagagaaggactctaatgcagaagaagattcaaataaaaaaattgaccaggatgttgtcattactaactcttatgaaacagctatgcgaacagcccaaaacttcctctccatcttccttaaaaaatgtggtagtaagcaaggtgaagaagattacagaccactgtttgaaaattttgttcaagaccttctttcaacagtcaataagcctgaatggccagctgctgaactactccttagtttgttagggagactgttggttcatcagttcagtaacaagtcaacagagatggctttaagagtggcatctcttgattaccttggaactgttgctgcacggctaagaaaagatgctgttacaagcaaaatggatcaaggatctatagaacgcattttaaaacaggtttcaggaggggaagatgaaatccaacaattacaaaaagcattgcttgattacttggatgaaaacactgagactgatccttcactagtgttttctcgtaaattctatatagcccagtggtttcgagacacaactctggaaacagaaaaagcaatgaaatcacaaaaagatgaagaatcatctgaaggaacacatcatgcaaaggaaattgagacaactggccaaattatgcatcgagctgaaaaccgaaaaaagtttcttagaagcattatcaaaaccacaccttctcagtttagcacattaaagatgaactctgatactgtggactatgatgatgcttgcttgattgttcgatacttggcctccatgaggccgtttgcccagagctttgatatttatttgacacagatcctacgagttcttggtgaaaatgcaattgctgttcgaacaaaagccatgaagtgtttgtctgaggttgttgctgtagaccccagtattctagcaaggcttgatatgcaacgaggtgttcatggacgattgatggataattcgactagtgtccgagaagcagcagtagaattactaggtcgatttgtcctttgtcgacctcagcttgctgaacagtattatgatatgctgattgaaagaatattggatactggtatcagtgtcaggaaaagagtaataaagattctcagagacatttgtattgaacaaccaacatttccaaaaatcacagaaatgtgtgtaaaaatgattcgcagagtcaatgatgaagagggcattaagaaattagtaaatgaaacattccagaaactctggtttactccaactccacacaatgacaaagaagcaatgacaaggaaaattttaaacattaccgatgtggttgcagcatgcagagatactggatatgactggtttgagcaactgcttcaaaacttgttgaagtccgaagaggattcctcatataaacctgtgaagaaagcttgtactcaacttgttgataacctagttgagcacattcttaaatatgaggaatctctagctgactctgacaataaaggtgtgaattctggaagattggtagcttgcataaccactttgttcttattcagcaaaataagaccccagctcatggttaaacatgcaatgactatgcaaccataccttaccactaaatgtagtacgcaaaatgatttcatggttatctgcaatgttgcaaaaatcctagagctagttgtaccactgatggagcatccaagtgaaacttttcttgccactattgaggaagatctaatgaagctcatcatcaaatatggcatgactgtagtgcaacattgtgtgagctgtcttggagctgttgtaaataaagtgacacaaaattttaaatttgtgtgggcttgtttcaatagatactatggtgccatttcaaaattaaaaagtcaacaccaagaggacccaaataacacttcacttctaacaaacaaaccagcacttcttagatcccttttcaccgttggagcactatgtcggcattttgattttgatctggaagattttaaaggcaacagcaaggttaacataaaagataaagtacttgaactattgatgtattttacaaaacactcagatgaagaagtacaaacaaaagctatcattggtctaggatttgcctttattcagcatccaagtctaatgttcgagcaagaagtgaagaatctatataataatattttatctgataagaactcctcagtcaatttaaaaatacaagtgttaaaaaacctccagacctacctacaagaagaagatacacgtatgcagcaggcagatagagactggaagaaagttgcaaaacaggaagacttaaaagaaatgggtgatgtttcctcagggatgagtagttccatcatgcagctttatctcaaacaggtgcttgaggcattttttcacacccagtcaagtgtacgccactttgccctaaatgtcattgcattgactctaaatcaaggtcttattcatccagttcagtgtgtgccatatttaattgctatgggcacagacccagaacctgctatgcggaacaaggctgatcagcaacttgtggaaatagacaaaaaatatgctggattcattcatatgaaagcagtggctggtatgaagatgtcttaccaggtacaacaggcaatcaacacatgcctaaaagatcctgtaaggggtttcagacaagacgagtcctctagcgctttgtgttcacacctttactccatgatccgtggaaaccgccaacacagacgagcctttcttatttctttactcaacctctttgatgacacagcaaaaacagacgtgactatgctcttgtatatagcagacaatctagcctgttttccataccagacacaggaagagccgttgtttataatgcatcatatagacattacactctcagtttctggtagtaacctactgcagtcattcaaggagtctatggtaaaggacaaaaggaaagagagaaaatcatcacctagtaaggaaaatgagtcaagcgacagtgaagaagaagtttccaggcctcggaagtcacggaaacgtgtagattcagattcagattcagattcagaagacgatataaattcagtgatgaaatgtttgccagaaaattcagctcctttaatcgaatttgcaaatgtgtcccagggtattttattacttctcatgttaaaacaacatttgaagaatctttgtggattttctgatagtaaaattcagaagtactctccatctgaatctgcaaaagtatatgataaagcgataaaccgaaaaacaggagttcattttcatccaaaacaaacactggacttcctgcggagtgacatggctaattccaaaatcacagaagaggtgaaaaggagtatagtaaaacagtatctagatttcaaacttctcatggaacatctggaccctgatgaagaagaagaagaaggggaggtttcagctagcacaaatgctcggaacaaagcaattacctcactgcttggaggaggcagccctaaaaataatacagcagcagagacagaagatgatgaaagtgatggggaggatagaggaggaggcacttcaggggtgaggcggaggaggagtcaacgtatttcgcagcgtattacgtaaaatgatttttatgtgcttatatatgtcagtctattaaatgtacaccaagtaatgtaatacttaaaagagaaaacattttgtagatagagattctctacttacccgtttatacatccttttgtagaaagtttaacataaaagacaataaaaaaacagaaatgagattt

SEQ ID NO: 12 - protein, 2697 aa, Homo sapiens
MNGDMPHVPITTLAGIASLTDLLNQLPLPSPLPATTTKSLLFNARIAEEVNCLLACRDDNLVSQLVHSLNQVSTDHIELKDNLGSDDPEGDIPVLLQAVLARSPNVFREKSMQNRYVQSGMMMSQYKLSQNSMHSSPASSNYQQTTISHSPSSRFVPPQTSSGNRFMPQQNSPVPSPYAPQSPAGYMPYSHPSSYTTHPQMQQASVSSPIVAGGLRNIHDNKVSGPLSGNSANHHADNPRHGSSEDYLHMVHRLSSDDGDSSTMRNAASFPLRSPQPVCSPAGSEGTPKGSRPPLILQSQSLPCSSPRDVPPDILLDSPERKQKKQKKMKLGKDEKEQSEKAAMYDIISSPSKDSTKLTLRLSRVRSSDMDQQEDMISGVENSNVSENDIPFNVQYPGQTSKTPITPQDINRPLNAAQCLSQQEQTAFLPANQVPVLQQNTSVAAKQPQTSVVQNQQQISQQGPIYDEVELDALAEIERIERESAIERERFSKEVQDKDKPLKKRKQDSYPQEAGGATGGNRPASQETGSTGNGSRPALMVSIDLHQAGRVDSQASITQDSDSIKKPEEIKQCNDAPVSVLQEDIVGSLKSTPENHPETPKKKSDPELSKSEMKQSESRLAESKPNENRLVETKSSENKLETKVETQTEELKQNESRTTECKQNESTIVEPKQNENRLSDTKPNDNKQNNGRSETTKSRPETPKQKGESRPETPKQKSDGHPETPKQKGDGRPETPKQKGESRPETPKQKNEGRPETPKHRHDNRRDSGKPSTEKKPEVSKHKQDTKSDSPRLKSERAEALKQRPDGRSVSESLRRDHDNKQKSDDRGESERHRGDQSRVRRPETLRSSSRNEHGIKSDSSKTDKLERKHRHESGDSRERPSSGEQKSRPDSPRVKQGDSNKSRSDKLGFKSPTSKDDKRTEGNKSKVDTNKAHPDNKAEFPSYLLGGRSGALKNFVIPKIKRDKDGNVTQETKKMEMKGEPKDKVEKIGLVEDLNKGAKPVVVLQKLSLDDVQKLIKDREDKSRSSLKPIKNKPSKSNKGSIDQSVLKELPPELLAEIESTMPLCERVKMNKRKRSTVNEKPKYAEISSDEDNDSDEAFESSRKRHKKDDDKAWEYEERDRRSSGDHRRSGHSHEGRRSSGGGRYRNRSPSDSDMEDYSPPPSLSEVARKMKKKEKQKKRKAYEPKLTPEEMMDSSTFKRFTASIENILDNLEDMDFTAFGDDDEIPQELLLGKHQLNELGSESAKIKAMGIMDKLSTDKTVKVLNILEKNIQDGSKLSTLLNHNNDTEEEERLWRDLIMERVTKSADACLTTINIMTSPNMPKAVYIEDVIERVIQYTKFHLQNTLYPQYDPVYRLDPHGGGLLSSKAKRAKCSTHKQRVIVMLYNKVCDIVSSLSELLEIQLLTDTTILQVSSMGITPFFVENVSELQLCAIKLVTAVFSRYEKHRQLILEEIFTSLARLPTSKRSLRNFRLNSSDMDGEPMYIQMVTALVLQLIQCVVHLPSSEKDSNAEEDSNKKIDQDVVITNSYETAMRTAQNFLSIFLKKCGSKQGEEDYRPLFENFVQDLLSTVNKPEWPAAELLLSLLGRLLVHQFSNKSTEMALRVASLDYLGTVAARLRKDAVTSKMDQGSIERILKQVSGGEDEIQQLQKALLDYLDENTETDPSLVFSRKFYIAQWFRDTTLETEKAMKSQKDEESSEGTHHAKEIETTGQIMHRAENRKKFLRSIIKTTPSQFSTLKMNSDTVDYDDACLIVRYLASMRPFAQSFDIYLTQILRVLGENAIAVRTKAMKCLSEVVAVDPSILARLDMQRGVHGRLMDNSTSVREAAVELLGRFVLCRPQLAEQYYDMLIERILDTGISVRKRVIKILRDICIEQPTFPKITEMCVKMIRRVNDEEGIKKLVNETFQKLWFTPTPHNDKEAMTRKILNITDVVAACRDTGYDWFEQLLQNLLKSEEDSSYKPVKKACTQLVDNLVEHILKYEESLADSDNKGVNSGRLVACITTLFLFSKIRPQLMVKHAMTMQPYLTTKCSTQNDFMVICNVAKILELVVPLMEHPSETFLATIEEDLMKLIIKYGMTVVQHCVSCLGAVVNKVTQNFKFVWACFNRYYGAISKLKSQHQEDPNNTSLLTNKPALLRSLFTVGALCRHFDFDLEDFKGNSKVNIKDKVLELLMYFTKHSDEEVQTKAIIGLGFAFIQHPSLMFEQEVKNLYNNILSDKNSSVNLKIQVLKNLQTYLQEEDTRMQQADRDWKKVAKQEDLKEMGDVSSGMSSSIMQLYLKQVLEAFFHTQSSVRHFALNVIALTLNQGLIHPVQCVPYLIAMGTDPEPAMRNKADQQLVEIDKKYAGFIHMKAVAGMKMSYQVQQAINTCLKDPVRGFRQDESSSALCSHLYSMIRGNRQHRRAFLISLLNLFDDTAKTDVTMLLYIADNLACFPYQTQEEPLFIMHHIDITLSVSGSNLLQSFKESMVKDKRKERKSSPSKENESSDSEEEVSRPRKSRKRVDSDSDSDSEDDINSVMKCLPENSAPLIEFANVSQGILLLLMLKQHLKNLCGFSDSKIQKYSPSESAKVYDKAINRKTGVHFHPKQTLDFLRSDMANSKITEEVKRSIVKQYLDFKLLMEHLDPDEEEEEGEVSASTNARNKAITSLLGGGSPKNNTAAETEDDESDGEDRGGGTSGVRRRRSQRISQRIT

SEQ ID NO: 13 - DNA, 4191 bp, Homo sapiens
  CDS (121)..(3246)
catctccgcagtctgggccgctgggtgcagaggctgccgcagacccagcggccatcgcctccctcaatcccaatatccattgtctcccaccccacctggccctccacttcccccacaaccatggcgcacgaatccgagaggagctctcgtctcggggtgccctgcggggagccggcagagctcggaggtgatgctagcgaggaggatcacccccaagtctgtgccaagtgctgcgcacaattcactgacccaactgaattcctcgcccaccagaacgcatgttctactgaccctcctgtaatggtgataattgggggccaggagaaccccaacaactcttcggcctcctctgaaccccggcctgagggtcacaataatcctcaggtcatggacacagagcatagcaaccccccagattctgggtcctccgtgcccacggatcccacctggggcccagagaggagaggagaggagtcttcagggcatttcctggtcgctgccacaggtacagcggctgggggaggcgggggcctgatcttggccagtcccaagctgggagcaaccccattacctccagaatcgacccctgcaccccctcctcctccaccaccccctccgcccccaggggtaggcagtggccacttgaatatccccctgatcttggaagagctacgggtgctgcagcagcggcagatccatcagatgcagatgactgagcaaatctgcaggcaggtgctgttgcttggctccttaggccagacggtgggtgcccctgccagtccctcagagctacctgggacagggactgcctcttccaccaagcccctactacccctcttcagccccatcaagcctgtccaaaccagcaagacactggcatcttcctcctcctcctcctcttcctcttcaggggcagaaacgcccaagcaggccttcttccacctttaccacccactggggtcacagcatcctttctctgctggaggggttgggcgaagccacaaacccacccctgccccttccccagccttgccaggcagcacagatcagctgattgcctcgcctcatctggcattcccaagcaccacgggactactggcagcacagtgtcttggggcagcccgaggccttgaggccactgcctccccagggctcctgaagccaaagaatggaagtggtgagctgagctacggagaagtgatgggtcccttggagaagcctggtggaaggcacaaatgccgcttctgtgccaaagtatttggcagtgacagtgccctgcagatccaccttcgttcccacacgggtgagaggccctataagtgcaatgtctgtggaaaccgttttaccacccgtggcaacctcaaagtgcatttccaccggcatcgtgagaagtacccacatgtgcagatgaacccacacccagtaccagagcacctagactatgtcattaccagcagtggcttgccttatggtatgtccgtgccaccagagaaggccgaggaggaggcagccactccaggtggaggggttgagcgcaagcctctggtggcctccacaacagcactcagtgccacagagagcctgactctgctctccaccagtgcaggcacagccacggctccaggactccctgctttcaataagtttgtgctcatgaaagcagtggaacccaagaataaagctgatgaaaacacccccccagggagtgagggctcagccatcagtggagtggcagaaagtagcacggcaactcgcatgcaactaagtaagttggtgacttcactaccaagctgggcactgcttaccaaccacttcaagtccactggcagcttccccttcccctatgtgctagagcccttgggggcctcaccctctgagacatcaaagctgcagcaactggtagaaaagattgaccggcaaggagctgtggcggtgacctcagctgcctcaggagcccccaccacctctgcccctgcaccttcatcctcagcctcttctggacctaaccagtgtgtcatctgtctccgagtgcttagctgtcctcgggccctacgccttcattatggccaacatggaggtgagaggcccttcaaatgcaaagtgtgtggcagagccttctccaccaggggtaatctgcgtgcacatttcgtgggccacaaggccagtccagctgcccgggcacagaattcctgccccatctgccagaagaagttcaccaatgctgtcactctgcagcagcatgtccggatgcacctggggggccagatccccaacggtggtactgcactccctgaaggtggaggagctgctcaggagaatggctccgagcaatctacagtctccggggcagggagtttcccccagcagcagtcccagcagccatcaccggaagaggagttgtctgaggaggaggaagaggaggatgaggaagaagaggaagatgtgactgatgaagattccctggcagggagaggctcagagagtggaggtgagaaggcaatatcagtgagaggtgattcagaagaggcatctggggcagaggaggaggtggggacagtggcggcagcagccacagctgggaaggagatggacagtaatgagaaaactactcaacagtcttctttgccaccaccaccaccacctgacagcctggatcagcctcagccaatggagcagggaagcagtggtgttttaggaggcaaggaagaggggggcaaaccggagagaagctcaagtccggcatcagcactcaccccagaaggggaagccaccagcgtgaccttggtagaggagctgagcctgcaggaggcaatgagaaaggagccaggagagagcagcagcagaaaggcctgcgaagtgtgtggccaggcctttccctcccaggcagctctggaggagcatcagaagacccaccccaaggaggggccgctcttcacttgtgttttctgcaggcagggctttcttgagcgggctaccctcaagaagcatatgctcctggcacaccaccagaaccagtatgtggcattcctgtcaaatggcctgcccatgaagccctggaattccagctccacctccactaccactccaagcctggccccaccagtgctgtttggcctaggaactgtggctgggaaggtgcctccaacaatgggatccagggaagccaaggagaagacagcccccctcctatttcagcctcctgcacccaaggcagtgcctgagaagcccatcatagacaagaagtagcaaactgtacattccttcttcctccccctgctccagaaggtgccggtactgaagatgctccagtaattggtgacccaaccctaggaagtagggagaaatgaaggaagggcataggaaaattttcccagtaaatcccctgatggtcacattaaggtaaaggttttggctggtcagtgtgccaagacctctccagcttctcattcatgatgacctctcaaagttgggaaacaagctgatttcttgccaagaggtctcccaggagatatttgggaaatgtgaagttcgtatctttaaggagcatttttggtcagcatggttgatgaactaatgatgagagagttaaggaatgttgctagaacatagggcttgctggtacctatgtgactaagaaagggacatgatgtaagggaaaaggcctcaaattcttgtgaatgtctggacattctcgttaatattcttttgggctaatagtgacatagtgtgcagaggtgtaccagggatcatgggggatttcctagcactagtatgcttctagttttagataactccctcctttattccctggccccttgtattttccttatcttcctctttcaagacccctacccattttgcctatccgtaggctggggcttgtgtctttgtcattgtctggttcttaagagtcccagactttgggagaccagctccaggtggcgtcctccctgcctctccgtcttgtaatgagttgtagtatttactcttaacataggatcatttggaacaggagttctgaggaggagagagtgagggttttgctattgactgacttgaacgatggcttctcctcaagctgtaggctccagagcttcctaacctagtaaaatgtcaagaacagacgggagatattagtgtctttccctctatcattaaaggtgttttaaccaaaaaaaaaaaaaaaaaaaa

SEQ ID NO: 14 - protein, 1041 aa, Homo sapiens
MAHESERSSRLGVPCGEPAELGGDASEEDHPQVCAKCCAQFTDPTEFLAHQNACSTDPPVMVIIGGQENPNNSSASSEPRPEGHNNPQVMDTEHSNPPDSGSSVPTDPTWGPERRGEESSGHFLVAATGTAAGGGGGLILASPKLGATPLPPESTPAPPPPPPPPPPPGVGSGHLNIPLILEELRVLQQRQIHQMQMTEQICRQVLLLGSLGQTVGAPASPSELPGTGTASSTKPLLPLFSPIKPVQTSKTLASSSSSSSSSSGAETPKQAFFHLYHPLGSQHPFSAGGVGRSHKPTPAPSPALPGSTDQLIASPHLAFPSTTGLLAAQCLGAARGLEATASPGLLKPKNGSGELSYGEVMGPLEKPGGRHKCRFCAKVFGSDSALQIHLRSHTGERPYKCNVCGNRFTTRGNLKVHFHRHREKYPHVQMNPHPVPEHLDYVITSSGLPYGMSVPPEKAEEEAATPGGGVERKPLVASTTALSATESLTLLSTSAGTATAPGLPAFNKFVLMKAVEPKNKADENTPPGSEGSAISGVAESSTATRMQLSKLVTSLPSWALLTNHFKSTGSFPFPYVLEPLGASPSETSKLQQLVEKIDRQGAVAVTSAASGAPTTSAPAPSSSASSGPNQCVICLRVLSCPRALRLHYGQHGGERPFKCKVCGRAFSTRGNLRAHFVGHKASPAARAQNSCPICQKKFTNAVTLQQHVRMHLGGQIPNGGTALPEGGGAAQENGSEQSTVSGAGSFPQQQSQQPSPEEELSEEEEEEDEEEEEDVTDEDSLAGRGSESGGEKAISVRGDSEEASGAEEEVGTVAAAATAGKEMDSNEKTTQQSSLPPPPPPDSLDQPQPMEQGSSGVLGGKEEGGKPERSSSPASALTPEGEATSVTLVEELSLQEAMRKEPGESSSRKACEVCGQAFPSQAALEEHQKTHPKEGPLFTCVFCRQGFLERATLKKHMLLAHHQNQYVAFLSNGLPMKPWNSSSTSTTTPSLAPPVLFGLGTVAGKVPPTMGSREAKEKTAPLLFQPPAPKAVPEKPIIDKK

SEQ ID NO: 15 - DNA, 3138 bp, Homo sapiens
  CDS (182)..(913)
cctcgctctccttccatctctctcgccccctctccctccgtcccgtcctcgccgctcccctcaccccgcctctctccccctcccccagcccctcctctcctcaccccacccggcctccctccctccctcgcccgcccggcgctcgcagaaccgacaccaggggggctctcgatgtagcaccatgacaggcatcgccgccgcctccttcttctccaatacctgccgattcgggggctgcggactccacttccccaccctggccgacctcatcgagcacatcgaggacaaccacatcgatacagatccacgggttttagaaaaacaagaattacagcagccaacctatgttgccctgagttacataaatagattcatgacagatgctgcccgccgagagcaggagtccctaaagaagaagattcagccgaagctctcgctgactctgtccagctcagtgtctcgagggaatgtgtccactcccccacgccacagcagtggaagccttactccccccgtgaccccacccatcaccccctcctcttcattccgcagcagcactccgacaggcagcgagtatgacgaggaggaggtggactatgaggagtcggacagcgatgagtcctggaccacagagagtgccatcagctccgaagccatcctcagctccatgtgcatgaatggaggggaagagaagccttttgcctgcccagttcctggatgtaaaaagagatacaagaatgtgaatggcataaagtatcacgctaagaatggtcacagaacacagattcgtgtccgcaaaccattcaagtgtcgctgtgggaagagttacaagacagctcagggcctgcggcaccacacaatcaatttccatcccccggtgtcggctgagattatcaggaagatgcagcaataacatgctggtcataactgtgccaagaaatcctcaccagcagttgctgattttgaaaacagccaccttttttcaggggaagcattcagcaaccctttaaagaaaaagaattaaatgcatgctttaaattttttctgtaattttggaatgatgtatctttgtagagttaatgattttgtacatttgcacatgtaatcatcatacccattttcattactttgatataaggtgctaaacaaaaaaagctctaggttcttcagcacatttcccccaaaacaaaataaaattgagggcatgttgcatattgttgaattgtattgcggtggtatcaacctggggggaggaggggctggcactgagatttttttttcaagattgtaatgtgattgaagttttcaacacatcaactcacatatgttcaaaaccaaaataataccttcattatcaaactggttaccatgccttacataatggagttagtatttgtgagtagaaagactttaggtaatggaaatataaataagaaagaatgtttaacataatatgctaaaaatattttcatatttaaataacatacgtaaaggtgtgctttctgtgttttatattatcttgcaaatccttttgccctttaaaaagctgaaaatcttgccatctgacttactagtcattttagtgttataaatggcattttgtacaaaatagtctattcagttcgttcattcatttaacacacattgattgagtgcctgctgggtacaagggattcaatttatgcctattgatatctgcggaccaagatacccayttagtgaaatacttttttccctgaaatctgttagaaaagactttgaaatacttcagtgcaaagtgtgtgtgtgtgaagtttagttatatcttcatcttcagatgaagttttaaagcactttgtagttctctattgccaacaatttaatgtttatgtgttgccaattcttgcaaccactgccctaccaaacctgtgggttgcaaatcagaactaaaattctaagcacgtttcaaagatgaacacttttgttaagacccctattgcctcttcttcatgctcattttttactttttttaaaaggtacttttctcatcacattgtagagaggtctgcattctcattggaaatgtctgtttagctttataaaacaaacactttgctgaaataggaaaatgagccttattgacaattaagtgcttcttgcagcaggtggtcaaagaaaagcatgactaatacgacctattagagtaatctacatctggaccattccttaagtttttcctcaccgacagtaccatcatgccttgagtgttcttttctcccaagtgctattccttaaacacgagagtttaccagttgcctaataatgcaataaaaaatgctttgagatagctaactgcccataaaacaaactcaaattgcttataaagtttcttcccatgttcccatttgatgaaaagtcttacatcacatataactgggaagcaggggtccctcctcaattttcagacattttgaaaggatgacagttctgtttgttagatgagtaaacctctatattcataagttctaaaatccttcattatgagggattcaaagtatttataaaaacactgccctctaaaaatttcctcagatctgaagtatggtcttggtcctgaatatacagtgttatcctatgtttaaaagggtgatccagacatgagacgcaactagttggtgcataagaaggccccacttggctatttcatatctacctacaattgaccaaaaaaaattttttaggccagcaattattatttagcttcgctctttctagtgcaagaaactgcaggctggatcagtagttcaacagctaaacagtcataaaatagtcattgtgcatgttaaatttctttcratgctttcaaagataaattccaatttctatttacttattcattgtgacagtattactaaacaggtaaggatgggaatattttgttatactgtgtatagtgaatgtattgtactgtgtctgtgaaaactgtgctttaaattatattttcatatgttttgttggggacagagcacattaagtctgaaagcaacagaggtttgttttagaactgaaggcaatttaatcaaaattcctgtcaagaaaagctgcttataaatgtaaatgaaatcacatttaaaataaactgcctctgacccaaaaaaa

SEQ ID NO: 16 - protein, 243 aa, Homo sapiens
MTGIAAASFFSNTCRFGGCGLHFPTLADLIEHIEDNHIDTDPRVLEKQELQQPTYVALSYINRFMTDAARREQESLKKKIQPKLSLTLSSSVSRGNVSTPPRHSSGSLTPPVTPPITPSSSFRSSTPTGSEYDEEEVDYEESDSDESWTTESAISSEAILSSMCMNGGEEKPFACPVPGCKKRYKNVNGIKYHAKNGHRTQIRVRKPFKCRCGKSYKTAQGLRHHTINFHPPVSAEIIRKMQQ

SEQ ID NO: 17 - DNA, 3387 bp, Homo sapiens
  CDS (8)..(2377)
agcgggcatggcctgccgggagggggcaggtagccggcgggcccggtccaatgggtgccggcttccgaggagagggcggaggagaggaggaaggaggcgaactgtgggccccggccccattcattgccgtggccggcgggcactggggccccgtgttttcagagtcatggaggcgctaattcctgtcataaacaagctccaggacgtcttcaacacggtgggcgccgacatcatccagctgcctcaaatcgtcgtagtgggaacgcagagcagcggaaagagctcagtgctagaaagcctggtggggagggacctgcttcccagaggtactggaattgtcacccggagacctctcattctgcaactggtccatgtgacacaagaagataaacggaaaacaacaggagaagaaaatggggtggaagcagaagaatggggtaaatttcttcacaccaaaaataagctttacacggattttgatgaaattcgacaagaaattgaaaatgaaacagaaagaatttcaggaaataataagggagtaagccctgaaccaattcatcttaagattttttcacccaacgttgtcaatttgacacttgtggatttgccaggaatgaccaaggtgcctgtaggtgatcaacctaaggatattgagcttcaaatcagagagctcattcttcggttcatcagtaatcctaattccattatcctcgctgtcactgctgctaatacagatatggcaacatcagaggcacttaaaatttcaagagaggtagatccagatggtcgcagaaccctagctgtaatcactaaacttgatctcatggatgcgggtactgatgccatggatgtattgatgggaagggttattccagtcaaacttggaataattggagtagttaacaggagccagctagatattaacaacaagaagagtgtaactgattcaatccgtgatgagtatgcttttcttcaaaagaaatatccatctctggccaatagaaatggaacaaagtatcttgctaggactctaaacaggttactgatgcatcacatcagagattgtttaccagagttgaaaacaagaataaatgttctagctgctcagtatcagtctcttctaaatagctacggtgaacccgtggatgataaaagtgctactttactccaacttattaccaaatttgccacagaatattgtaacactattgaaggaactgcaaaatatattgaaacttcggagctatgcggtggtgctagaatttgttatattttccatgagacttttgggcgaaccttagaatctgttgatccacttggtggccttaacactattgacattttgactgccattagaaatgctactggtcctcgtcctgctttatttgtgcctgaggtttcatttgagttactggtgaagcggcaaatcaaacgtctagaagagcccagcctccgctgtgtggaactggttcatgaggaaatgcaaaggatcattcagcactgtagcaattacagtacacaggaattgttacgatttcctaaacttcatgatgccatagttgaagtggtgacttgtcttcttcgtaaaaggttgcctgttacaaatgaaatggtccataacttagtggcaattgaactggcttatatcaacacaaaacatccagactttgctgatgcttgtgggctaatgaacaataatatagaggaacaaaggagaaacaggctagccagagaattaccttcagctgtatcacgagacaagtcttctaaagttccaagtgctttggcacctgcctcccaggagccctcccccgctgcttctgctgaggctgatggcaagttaattcaggacagcagaagagaaactaaaaatgttgcatctggaggtggtggggttggagatggtgttcaagaaccaaccacaggcaactggagaggaatgctgaaaacttcaaaagctgaagagttattagcagaagaaaaatcaaaacccattccaattatgccagccagtccacaaaaaggtcatgccgtgaacctgctagatgtgccagttcctgttgcacgaaaactatctgctcgggaacagcgagattgtgaggttattgaacgactcattaaatcatattttctcattgtcagaaagaatattcaagacagtgtgccaaaggcagtaatgcattttttggttaatcatgtgaaagacactcttcagagtgagctagtaggccagctgtataaatcatccttattggatgatcttctgacagaatctgaggacatggcacagcgcaggaaagaagcagctgatatgctaaaggcattacaaggagccagtcaaattattgctgaaatccgggagactcatctttggtgaagagaactatgtaatactgagactttgttgactcaaaacttgctagttactgcctacctgagtagaatcttatttatgaactcctgtgtattgcaatggtatgaatctgctcatgtggagactggctataaactgaaaagtgtattccaaattgcagaacacatcacacatttaatccaaataataaatggctgtttctaaagtttcccagtatatataaaatacatcaagtctgtcttgtgacagtttcatctgaacttaacttaaaaacaactgttaatgttctagttgtgcaaagcagtttgcctgtggataagatgacctgtgtaataatctttgttagtagtcttaaagctgctgccatagtcctccaagaagaaagcaccaagacaacatttcatatgactataatgcatgtactatataagctgatctggctttgaaagatgtgagttggcaagttcctcacatagagtcattgtattccacctgtccttcaatttagttttttctgagcttctttgcagcctttgatgtgtttttaagaaagctgaatgcacaagaggatctgtgacactgacatggctgtggtgtgcatactgtgtagttacatagcccttccaattctgggtccatttgcactagcaaattaaaatatgctttgattcatacttaaacctgaaagcaggaatgcctacattaattcctacattaaaaacagccatctacccttgattatctagaaagacttggtaatgatggtcagttccttttagatttcagaaaatcaaatgatgacctaaatttcccttaatttgcaaatacagtagtaattaaggtacatctctaaagtggagcacttacaccaggctctaagattcactttgaggtggaacttaaaaccagtgtactgtatgtatgcattggtaatagctacttttgcttcatagcttcataccaacaaaatatatttattagaatagtatgaaagtactgaaggagttgaaaga

SEQ ID NO: 18 - protein, 789 aa, Homo sapiens
MACREGAGSRRARSNGCRLPRRGRRRGGRRRTVGPGPIHCRGRRALGPRVFRVMEALIPVINKLQDVFNTVGADIIQLPQIVVVGTQSSGKSSVLESLVGRDLLPRGTGIVTRRPLILQLVHVTQEDKRKTTGEENGVEAEEWGKFLHTKNKLYTDFDEIRQEIENETERISGNNKGVSPEPIHLKIFSPNVVNLTLVDLPGMTKVPVGDQPKDIELQIRELILRFISNPNSIILAVTAANTDMATSEALKISREVDPDGRRTLAVITKLDLMDAGTDAMDVLMGRVIPVKLGIIGVVNRSQLDINNKKSVTDSIRDEYAFLQKKYPSLANRNGTKYLARTLNRLLMHHIRDCLPELKTRINVLAAQYQSLLNSYGEPVDDKSATLLQLITKFATEYCNTIEGTAKYIETSELCGGARICYIFHETFGRTLESVDPLGGLNTIDILTAIRNATGPRPALFVPEVSFELLVKRQIKRLEEPSLRCVELVHEEMQRIIQHCSNYSTQELLRFPKLHDAIVEVVTCLLRKRLPVTNEMVHNLVAIELAYINTKHPDFADACGLMNNNIEEQRRNRLARELPSAVSRDKSSKVPSALAPASQEPSPAASAEADGKLIQDSRRETKNVASGGGGVGDGVQEPTTGNWRGMLKTSKAEELLAEEKSKPIPIMPASPQKGHAVNLLDVPVPVARKLSAREQRDCEVIERLIKSYFLIVRKNIQDSVPKAVMHFLVNHVKDTLQSELVGQLYKSSLLDDLLTESEDMAQRRKEAADMLKALQGASQIIAEIRETHLW

SEQ ID NO: 19 - DNA, 2509 bp, Homo sapiens
  CDS (8)..(2299)
agcgggcatggcctgccgggagggggcaggtagccggcgggcccggtccaatgggtgccggcttccgaggagagggcggaggagaggaggaaggaggcgaactgtgggccccggccccattcattgccgtggccggcgggcactggggccccgtgttttcagagtcatggaggcgctaattcctgtcataaacaagctccaggacgtcttcaacacggtgggcgccgacatcatccagctgcctcaaatcgtcgtagtgggaacgcagagcagcggaaagagctcagtgctagaaagcctggtggggagggacctgcttcccagaggtactggaattgtcacccggagacctctcattctgcaactggtccatgtgacacaagaagataaacggaaaacaacaggagaagaaaatggggtggaagcagaagaatggggtaaatttcttcacaccaaaaataagctttacacggattttgatgaaattcgacaagaaattgaaaatgaaacagaaagaatttcaggaaataataagggagtaagccctgaaccaattcatcttaagattttttcacccaacgttgtcaatttgacacttgtggatttgccaggaatgaccaaggtgcctgtaggtgatcaacctaaggatattgagcttcaaatcagagagctcattcttcggttcatcagtaatcctaattccattatcctcgctgtcactgctgctaatacagatatggcaacatcagaggcacttaaaatttcaagagaggtagatccagatggtcgcagaaccctagctgtaatcactaaacttgatctcatggatgcgggtactgatgccatggatgtattgatgggaagggttattccagtcaaacttggaataattggagtagttaacaggagccagctagatattaacaacaagaagagtgtaactgattcaatccgtgatgagtatgcttttcttcaaaagaaatatccatctctggccaatagaaatggaacaaagtatcttgctaggactctaaacaggttactgatgcatcacatcagagattgtttaccagagttgaaaacaagaataaatgttctagctgctcagtatcagtctcttctaaatagctacggtgaacccgtggatgataaaagtgctactttactccaacttattaccaaatttgccacagaatattgtaacactattgaaggaactgcaaaatatattgaaacttcggagctatgcggtggtgctagaatttgttatattttccatgagacttttgggcgaaccttagaatctgttgatccacttggtggccttaacactattgacattttgactgccattagaaatgctactggtcctcgtcctgctttatttgtgcctgaggtttcatttgagttactggtgaagcggcaaatcaaacgtctagaagagcccagcctccgctgtgtggaactggttcatgaggaaatgcaaaggatcattcagcactgtagcaattacagtacacaggaattgttacgatttcctaaacttcatgatgccatagttgaagtggtgacttgtcttcttcgtaaaaggttgcctgttacaaatgaaatggtccataacttagtggcaattgaactggcttatatcaacacaaaacatccagactttgctgatgcttgtgggctaatgaacaataatatagaggaacaaaggagaaacaggctagccagagaattaccttcagctgtatcacgagacaagttaattcaggacagcagaagagaaactaaaaatgttgcatctggaggtggtggggttggagatggtgttcaagaaccaaccacaggcaactggagaggaatgctgaaaacttcaaaagctgaagagttattagcagaagaaaaatcaaaacccattccaattatgccagccagtccacaaaaaggtcatgccgtgaacctgctagatgtgccagttcctgttgcacgaaaactatctgctcgggaacagcgagattgtgaggttattgaacgactcattaaatcatattttctcattgtcagaaagaatattcaagacagtgtgccaaaggcagtaatgcattttttggttaatcatgtgaaagacactcttcagagtgagctagtaggccagctgtataaatcatccttattggatgatcttctgacagaatctgaggacatggcacagcgcaggaaagaagcagctgatatgctaaaggcattacaaggagccagtcaaattattgctgaaatccgggagactcatctttggtgaagagaactatgtaatactgagactttgttgactcaaaacttgctagttactgcctacctgagtagaatcttatttatgaactcctgtgtattgcaatggtatgaatctgctcatgtggagactggctataaactgaaaagtgtattccaaattgcagaacacatcacacatttaatccaaataataaatggctgtttctaaaaaaaaaaa

SEQ ID NO: 20 - protein, 763 aa, Homo sapiens
MACREGAGSRRARSNGCRLPRRGRRRGGRRRTVGPGPIHCRGRRALGPRVFRVMEALIPVINKLQDVFNTVGADIIQLPQIVVVGTQSSGKSSVLESLVGRDLLPRGTGIVTRRPLILQLVHVTQEDKRKTTGEENGVEAEEWGKFLHTKNKLYTDFDEIRQEIENETERISGNNKGVSPEPIHLKIFSPNVVNLTLVDLPGMTKVPVGDQPKDIELQIRELILRFISNPNSIILAVTAANTDMATSEALKISREVDPDGRRTLAVITKLDLMDAGTDAMDVLMGRVIPVKLGIIGVVNRSQLDINNKKSVTDSIRDEYAFLQKKYPSLANRNGTKYLARTLNRLLMHHIRDCLPELKTRINVLAAQYQSLLNSYGEPVDDKSATLLQLITKFATEYCNTIEGTAKYIETSELCGGARICYIFHETFGRTLESVDPLGGLNTIDILTAIRNATGPRPALFVPEVSFELLVKRQIKRLEEPSLRCVELVHEEMQRIIQHCSNYSTQELLRFPKLHDAIVEVVTCLLRKRLPVTNEMVHNLVAIELAYINTKHPDFADACGLMNNNIEEQRRNRLARELPSAVSRDKLIQDSRRETKNVASGGGGVGDGVQEPTTGNWRGMLKTSKAEELLAEEKSKPIPIMPASPQKGHAVNLLDVPVPVARKLSAREQRDCEVIERLIKSYFLIVRKNIQDSVPKAVMHFLVNHVKDTLQSELVGQLYKSSLLDDLLTESEDMAQRRKEAADMLKALQGASQIIAEIRETHLW

SEQ ID NO: 21 - DNA, 2539 bp, Homo sapiens
  CDS (8)..(2266)
agcgggcatggcctgccgggagggggcaggtagccggcgggcccggtccaatgggtgccggcttccgaggagagggcggaggagaggaggaaggaggcgaactgtgggccccggccccattcattgccgtggccggcgggcactggggccccgtgttttcagagtcatggaggcgctaattcctgtcataaacaagctccaggacgtcttcaacacggtgggcgccgacatcatccagctgcctcaaatcgtcgtagtgggaacgcagagcagcggaaagagctcagtgctagaaagcctggtggggagggacctgcttcccagaggtactggaattgtcacccggagacctctcattctgcaactggtccatgtgacacaagaagataaacggaaaacaacaggagaagaaaatggggtggaagcagaagaatggggtaaatttcttcacaccaaaaataagctttacacggattttgatgaaattcgacaagaaattgaaaatgaaacagaaagaatttcaggaaataataagggagtaagccctgaaccaattcatcttaagattttttcacccaacgttgtcaatttgacacttgtggatttgccaggaatgaccaaggtgcctgtaggtgatcaacctaaggatattgagcttcaaatcagagagctcattcttcggttcatcagtaatcctaattccattatcctcgctgtcactgctgctaatacagatatggcaacatcagaggcacttaaaatttcaagagaggtagatccagatggctgcagaaccctagctgtaatcactaaacttgatctcatggatgcgggtactgatgccatggatgtattgatgggaagggttattccagtcaaacttggaataattggagtagttaacaggagccagctagatattaacaacaagaagagtgtaactgattcaatccgtgatgagtatgcttttcttcaaaagaaatatccatctctggccaatagaaatggaacaaagtatcttgctaggactctaaacaggttactgatgcatcacatcagagattgtttaccagagttgaaaacaagaataaatgttctagctgctcagtatcagtctcttctaaatagctacggtgaacccgtggatgataaaagtgctactttactccaacttattaccaaatttgccacagaatattgtaacactattgaaggaactgcaaaatatattgaaacttcggagctatgcggtggtgctagaatttgttatattttccatgagacttttgggcgaaccttagaatctgttgatccacttggtggccttaacactattgacattttgactgccattagaaatgctactggtcctcgtcctgctttatttgtgcctgaggtttcatttgagttactggtgaagcggcaaatcaaacgtctagaagagcccagcctccgctgtgtggaactggttcatgaggaaatgcaaaggatcattcagcactgtagcaattacagtacacaggaattgttacgatttcctaaacttcatgatgccatagttgaagtggtgacttgtcttcttcgtaaaaggttgcctgttacaaatgaaatggtccataacttagtggcaattgaactggcttatatcaacacaaaacatccagactttgctgatgcttgtgggctaatgaacaataatatagaggaacaaaggagaaacaggctagccagagaattaccttcagctgtatcacgagacaaggttgcatctggaggtggtggggttggagatggtgttcaagaaccaaccacaggcaactggagaggaatgctgaaaacttcaaaagctgaagagttattagcagaagaaaaatcaaaacccattccaattatgccagccagtccacaaaaaggtcatgccgtgaacctgctagatgtgccagttcctgttgcacgaaaactatctgctcgggaacagcgagattgtgaggttattgaacgactcattaaatcatattttctcattgtcagaaagaatattcaagacagtgtgccaaaggcagtaatgcattttttggttaatcatgtgaaagacactcttcagagtgagctagtaggccagctgtataaatcatccttattggatgatcttctgacagaatctgaggacatggcacagcgcaggaaagaagcagctgatatgctaaaggcattacaaggagccagtcaaattattgctgaaatccgggagactcatctttggtgaagagaactatgtaatactgagactttgttgactcaaaacttgctagttactgcctacctgagtagaatcttatttatgaactcctgtgtattgcaatggtatgaatctgctcatgtggagactggctataaactgaaaagtgtattctaaattgcagaacacatcacacatttaatccaaataataaatggctgtttcaaaaaaaaaaaaaaaaaaaaaaaaaaaaaaaaaaaaaaaaaaaaaaaaaaaaaaaaaaaaaaaaaaaaaaaaaaa

SEQ ID NO: 22 - protein, 752 aa, Homo sapiens
MACREGAGSRRARSNGCRLPRRGRRRGGRRRTVGPGPIHCRGRRALGPRVFRVMEALIPVINKLQDVFNTVGADIIQLPQIVVVGTQSSGKSSVLESLVGRDLLPRGTGIVTRRPLILQLVHVTQEDKRKTTGEENGVEAEEWGKFLHTKNKLYTDFDEIRQEIENETERISGNNKGVSPEPIHLKIFSPNVVNLTLVDLPGMTKVPVGDQPKDIELQIRELILRFISNPNSIILAVTAANTDMATSEALKISREVDPDGCRTLAVITKLDLMDAGTDAMDVLMGRVIPVKLGIIGVVNRSQLDINNKKSVTDSIRDEYAFLQKKYPSLANRNGTKYLARTLNRLLMHHIRDCLPELKTRINVLAAQYQSLLNSYGEPVDDKSATLLQLITKFATEYCNTIEGTAKYIETSELCGGARICYIFHETFGRTLESVDPLGGLNTIDILTAIRNATGPRPALFVPEVSFELLVKRQIKRLEEPSLRCVELVHEEMQRIIQHCSNYSTQELLRFPKLHDAIVEVVTCLLRKRLPVTNEMVHNLVAIELAYINTKHPDFADACGLMNNNIEEQRRNRLARELPSAVSRDKVASGGGGVGDGVQEPTTGNWRGMLKTSKAEELLAEEKSKPIPIMPASPQKGHAVNLLDVPVPVARKLSAREQRDCEVIERLIKSYFLIVRKNIQDSVPKAVMHFLVNHVKDTLQSELVGQLYKSSLLDDLLTESEDMAQRRKEAADMLKALQGASQIIAEIRETHLW

SEQ ID NO: 23 - DNA, 6289 bp, Homo sapiens
  CDS (1177)..(5931)
atgcctcagtttttaaaaaaggatccttacacttcatgtctcctagccatcagaagaggaatgagacagcaaaagttcaaatggcctgtttcaagtttctgatataaaacgatgacattttcaggaaaatcctgcatttccagagagagactggctggttaaatttctgaaagaggacaccagctaaaagaaggtattgcatctcacccgagcagactgtgtctgtggaaagtgtaagccccttgccagaagagcagcttcccagcaaaggcagagggtgaaaacagcaaaggtcttaagacactggggacctagagtcaaaagggacctcctccagggaaaacgctgtgtgagaaatggcctcattcggtgactgtgagtgacacagcagaaagttgggtcattccggctgcttttttgagaagtccctgaagagatcaataacagcaagagggaacctggcaaggaagctattcctataatccaggaaagagatgaggaaggcttggaccaggtggtagtggtgtcaggtagtcaaatgctgggtatattttgaagatacaccccataggatttgctccacattgaatgtggaatgctggaagagagataaagtgtacctgtcacatactttttgagttttatttattttcttagaagtaagtacacaaagagatgctacctaggagaagggtattcttttcactattctttcaaattttctgtatgttcgaacattttcatagtagaaagttggggggaaaatctgtttcataaacatttcctcagcagcagtccagtctattgcattttaattggttgtgatatcattgttttatgcaatacgttctcaacaagtatatcctccggcaaactgaacaaggaccaagtctgttctgcctacagctctgcttcctcatagctgctttccagaacgtgactcttgcaaattatcaagaaaggggaactaatctaagggatccagatcaaacagcctcatgaagacttattttatgtttctaatataaagatagaagttttcagaaaagccctgctacacagaggatcagagcaggggtgggcctgctgggctgcagctgggattctgagcatcctttcccggaggcacggaaagtgagtgagtgagcccagtgaggaagaagttgaagctttgatatgagtaaacaagtatctctacctgaaatgattaaagactggaccaaagagcatgtgaaaaaatgggtaaatgaagaccttaagattaatgagcaatacgggcaaattctgctcagtgaagaagtaacaggattagtcctgcaggaattaactgagaaggaccttgtagaaatggggctaccatggggtccagcacttttgataaaacgttcatacaacaaattgaatagtaagtcccctgaaagtgacaatcatgatccgggacaattagataattcaaaaccgtccaaaacagaacaccaaaaaaatccaaaacacaccaaaaaggaagaagaaaattcaatgtcatctaatattgattatgatcccagagagatcagagatatcaaacaagaagaatcaattcttatgaaagaaaatgtgttagatgaagtagcaaatgctaaacacaagaaaaagggtaagctaaaacctgaacaattgacttgtatgccatatccttttgatcagttccatgacagccatcgctacatagaacattatactctacaacctgaaacaggagcactcaatctcattgatccaatacatgagttcaaagctctcacaaacacagaaacagccacggaagtggacattaagatgaaattcagcaatgaagtcttccgatttgcatcagcttgtatgaattcacgcaccaatggcaccatccattttggagtcaaggacaaaccccatggagaaattgttggtgtgaaaatcaccagtaaggctgccttcattgaccacttcaatgtaatgatcaaaaagtattttgaagaaagtgagatcaatgaagccaagaagtgtattcgggagccaaggtttgtggaagtccttctgcagaacaatacaccatctgacagatttgtcattgaagttgatactattccaaaacactctatatgtaatgataagtatttctacattcagatgcaaatttgtaaagataaaatatggaaacaaaaccaaaatctttcactgtttgtaagagaaggggctagctctagggatatcctggccaattccaagcaacgggatgtagatttcaaggcatttttacaaaatttaaagtcactggtagcatctagaaaagaggctgaagaagagtatggaatgaaggcaatgaagaaggagagtgaaggactaaagctggttaaacttctcataggaaaccgagactcactggataattcatactatgactggtacattcttgtaacaaataaatgccatccaaaccaaataaagcacttagattttttaaaagaaattaaatggtttgctgtgttggagtttgatcctgaatctatgatcaatggagtggtcaaagcttacaaagaaagtcgggtggcaaaccttcactttccaaatcaatatgaagacaagacaactaacatgtgggagaagatttctactcttaatctttaccaacagcccagctggattttctgcaacggcagatcagacctgaaaagcgagacatataaacctctagaaccacatttatggcagagagaaagagcttcagaagtcaggaaactaattttatttctcacagatgaaaatataatgacaagaggaaaatttttggtagtgtttctattactctcttcagtggaaagcccaggagatccactcattgaaactttctgggctttctatcaagctctcaaaggaatggaaaatatgttgtgtatctctgtaaactcacatatttatcaacgatggaaagatctactacaaacaagaacgaagatggaagatgaactaacaaaccacagtatttccactttaaatatagaactggtaaacagcactatccttaaactaaaatcggtgactcggtcatcaagaaggtttttgcccgcccgtggatcttcttcagttatcctagagaaaaagaaagaggatgtcttgactgcactggaaatcctctgtgaaaatgagtgtacagagacagacatcgagaaagacaaatctaaattcctggagtttaagaaatcaaaagaagaacacttttatcgaggtggcaaagtatcctggtggaacttctatttttcttctgaaaactattcttcagattttgttaaaagggacagttatgaaaagcttaaagatttaatacactgctgggcagagtctcctaaaccaatatttgcaaaaatcatcaatctttatcatcatccaggctgtggaggtaccacactggctatgcatgttctctgggacttaaagaaaaacttcagatgtgctgtgttaaaaaacaagacaactgattttgcagaaattgcagagcaagtgatcaatctggtcacctatagggcaaagagccatcaggattacattcctgtgcttctccttgtggatgattttgaagaacaagaaaatgtctactttctacaaaatgccatccattccgttttagcagaaaaggatttgcgatatgaaaaaacattggtaattatcttaaactgcatgagatcccggaatccagatgaaagtgcaaaattggcagacagtattgcactaaattaccaactttcttccaaggaacaaagagcctttggtgccaaactgaaggaaattgaaaagcagcacaagaactgtgaaaacttttattccttcatgatcatgaaaagcaattttgatgaaacatatatagaaaatgtagtcaggaatatcctaaaaggacaggatgttgacagcaaggaagcacaactcatttccttcctggctttactcagctcttatgttactgactctacaatttcagtttcacagtgtgaaatatttttgggaatcatatacactagtacaccctgggaacctgaaagcttagaagacaagatgggaacttattctacacttctaataaaaacagaagttgcagaatatgggagatacacaggtgtgcgtatcattcaccctctgattgccctgtactgtctaaaagaactggaaagaagctatcacttggataaatgtcaaattgcattgaatatattagaagagaatttattctatgattctggaataggaagagacaaatttcaacatgatgttcaaactcttctgcttacaagacagcgcaaggtgtatggagatgaaacagacactctgttttccccattaatggaagctttacagaataaagacattgaaaaggtcttgagtgcaggaagtagacgattcccacaaaatgcattcatttgtcaagccttagcaagacatttctacattaaagagaaggactttaacacagctctggactgggcacgtcaggccaaaatgaaagcacctaaaaattcctatatttcagatacactaggtcaagtctacaaaagtgaaatcaaatggtggttggatgggaacaaaaactgtaggagcattactgttaatgacctaacacatctcctagaagctgcggaaaaagcctcaagagctttcaaagaatcccaaaggcaaactgatagtaaaaactatgaaaccgagaactggtcaccacagaagtcccagagacgatatgacatgtataacacagcttgtttcttgggtgaaatagaagttggtctttacactatccagattcttcagctcactccctttttccacaaagaaaatgaattatccaaaaaacatatggtgcaatttttatcaggaaagtggaccattcctcctgatcccagaaatgaatgttatttggctcttagcaagttcacatcccacctaaaaaatttacaatcagatctgaaaaggtgctttgacttttttattgattatatggttcttctgaaaatgaggtatacccaaaaagaaattgcagaaatcatgttaagcaagaaagtcagtcgttgtttcaggaaatacacagaacttttctgtcatttggatccatgtctattacaaagtaaagagagtcaattactccaggaggagaattgcaggaaaaagctagaagctctgagagcagataggtttgctggactcttggaatatcttaatccaaactacaaagatgctaccaccatggaaagtatagtgaatgaatatgccttcctactgcagcaaaactcaaaaaagcccatgacaaatgagaaacaaaattccattttggccaacattattctgagttgtctaaagcccaactccaagttaattcaaccacttaccacgctaaaaaaacaactccgagaggtcttgcaatttgtaggactaagtcatcaatatccaggtccttatttcttggcctgcctcctgttctggccagaaaatcaagagctagatcaagattccaaactaatagaaaagtatgtttcatccttaaatagatccttcaggggacagtacaagcgcatgtgcaggtccaagcaggcaagcacacttttctatctgggcaaaaggaagggtctaaacagtattgttcacaaggccaaaatagagcagtactttgataaagcacaaaatacaaattccctctggcacagtggggatgtgtggaaaaaaaatgaagtcaaagacctcctgcgtcgtctaactggtcaggctgaaggcaagctaatctctgtagaatatggaacagaggaaaaaataaaaataccagtaatatctgtttattcaggtccactcagaagtggtaggaacatagaaagagtgtctttctacctaggattttccattgaaggccctctggcatatgatatagaagtaatttaagacaatacatcacctgtagttcaaatatgtttatttatatctttatgattttattctctctctctattctcatggcactttcataacattatggctaacctctaattacagattttgcttttgcctccctgaatgaattacaagcctttttaagatatgaaatatgcctacccgcagagcttggcacaaagtggagtcaatcttttaatgttttaaatatgcattttcagactcaaataattaagaagtttcattgatatccactggtcacatcataactgtctatagggcaataaaatctgtgttaaactcaaaaaaaaaaaaaaaaaaaaaaaaaaaaaaaaaaaaaaaaaaaaaa

SEQ ID NO: 24 - protein, 1584 aa, Homo sapiens
MSKQVSLPEMIKDWTKEHVKKWVNEDLKINEQYGQILLSEEVTGLVLQELTEKDLVEMGLPWGPALLIKRSYNKLNSKSPESDNHDPGQLDNSKPSKTEHQKNPKHTKKEEENSMSSNIDYDPREIRDIKQEESILMKENVLDEVANAKHKKKGKLKPEQLTCMPYPFDQFHDSHRYIEHYTLQPETGALNLIDPIHEFKALTNTETATEVDIKMKFSNEVFRFASACMNSRTNGTIHFGVKDKPHGEIVGVKITSKAAFIDHFNVMIKKYFEESEINEAKKCIREPRFVEVLLQNNTPSDRFVIEVDTIPKHSICNDKYFYIQMQICKDKIWKQNQNLSLFVREGASSRDILANSKQRDVDFKAFLQNLKSLVASRKEAEEEYGMKAMKKESEGLKLVKLLIGNRDSLDNSYYDWYILVTNKCHPNQIKHLDFLKEIKWFAVLEFDPESMINGVVKAYKESRVANLHFPNQYEDKTTNMWEKISTLNLYQQPSWIFCNGRSDLKSETYKPLEPHLWQRERASEVRKLILFLTDENIMTRGKFLVVFLLLSSVESPGDPLIETFWAFYQALKGMENMLCISVNSHIYQRWKDLLQTRTKMEDELTNHSISTLNIELVNSTILKLKSVTRSSRRFLPARGSSSVILEKKKEDVLTALEILCENECTETDIEKDKSKFLEFKKSKEEHFYRGGKVSWWNFYFSSENYSSDFVKRDSYEKLKDLIHCWAESPKPIFAKIINLYHHPGCGGTTLAMHVLWDLKKNFRCAVLKNKTTDFAEIAEQVINLVTYRAKSHQDYIPVLLLVDDFEEQENVYFLQNAIHSVLAEKDLRYEKTLVIILNCMRSRNPDESAKLADSIALNYQLSSKEQRAFGAKLKEIEKQHKNCENFYSFMIMKSNFDETYIENVVRNILKGQDVDSKEAQLISFLALLSSYVTDSTISVSQCEIFLGIIYTSTPWEPESLEDKMGTYSTLLIKTEVAEYGRYTGVRIIHPLIALYCLKELERSYHLDKCQIALNILEENLFYDSGIGRDKFQHDVQTLLLTRQRKVYGDETDTLFSPLMEALQNKDIEKVLSAGSRRFPQNAFICQALARHFYIKEKDFNTALDWARQAKMKAPKNSYISDTLGQVYKSEIKWWLDGNKNCRSITVNDLTHLLEAAEKASRAFKESQRQTDSKNYETENWSPQKSQRRYDMYNTACFLGEIEVGLYTIQILQLTPFFHKENELSKKHMVQFLSGKWTIPPDPRNECYLALSKFTSHLKNLQSDLKRCFDFFIDYMVLLKMRYTQKEIAEIMLSKKVSRCFRKYTELFCHLDPCLLQSKESQLLQEENCRKKLEALRADRFAGLLEYLNPNYKDATTMESIVNEYAFLLQQNSKKPMTNEKQNSILANIILSCLKPNSKLIQPLTTLKKQLREVLQFVGLSHQYPGPYFLACLLFWPENQELDQDSKLIEKYVSSLNRSFRGQYKRMCRSKQASTLFYLGKRKGLNSIVHKAKIEQYFDKAQNTNSLWHSGDVWKKNEVKDLLRRLTGQAEGKLISVEYGTEEKIKIPVISVYSGPLRSGRNIERVSFYLGFSIEGPLAYDIEVI

SEQ ID NO: 25 - DNA, 3345 bp, Homo sapiens
  CDS (67)..(3108)
cttctgccagcagaagcagcagccgcagcacctgagccgctactgccgctcactcaggacaacgctatggctgagcctgggcacagccaccatctctccgccagagtcaggggaagaactgagaggcgcataccccggctgtggcggctgctgctctgggctgggaccgccttccaggtgacccagggaacgggaccggagcttcacgcctgcaaagagtctgagtaccactatgagtacacggcgtgtgacagcacgggttccaggtggagggtcgccgtgccgcataccccgggcctgtgcaccagcctgcctgaccccgtcaagggcaccgagtgctccttctcctgcaacgccggggagtttctggatatgaaggaccagtcatgtaagccatgcgctgagggccgctactccctcggcacaggcattcggtttgatgagtgggatgagctgccccatggctttgccagcctctcagccaacatggagctggatgacagtgctgctgagtccaccgggaactgtacttcgtccaagtgggttccccggggcgactacatcgcctccaacacggacgaatgcacagccacactgatgtacgccgtcaacctgaagcaatctggcaccgttaacttcgaatactactatccagactccagcatcatctttgagtttttcgttcagaatgaccagtgccagcccaatgcagatgactccaggtggatgaagaccacagagaaaggatgggaattccacagtgtggagctaaatcgaggcaataatgtcctctattggagaaccacagccttctcagtatggaccaaagtacccaagcctgtgctggtgagaaacattgccataacaggggtggcctacacttcagaatgcttcccctgcaaacctggcacgtatgcagacaagcagggctcctctttctgcaaactttgcccagccaactcttattcaaataaaggagaaacttcttgccaccagtgtgaccctgacaaatactcagagaaaggatcttcttcctgtaacgtgcgcccagcttgcacagacaaagattatttctacacacacacggcctgcgatgccaacggagagacacaactcatgtacaaatgggccaagccgaaaatctgtagcgaggaccttgagggggcagtgaagctgcctgcctctggtgtgaagacccactgcccaccctgcaacccaggcttcttcaaaaccaacaacagcacctgccagccctgcccatatggttcctactccaatggctcagactgtacccgctgccctgcagggactgaacctgctgtgggatttgaatacaaatggtggaacacgctgcccacaaacatggaaacgaccgttctcagtgggatcaacttcgagtacaagggcatgacaggctgggaggtggctggtgatcacatttacacagctgctggagcctcagacaatgacttcatgattctcactctggttgtgccaggatttagacctccgcagtcggtgatggcagacacagagaataaagaggtggccagaatcacatttgtctttgagaccctctgttctgtgaactgtgagctctacttcatggtgggtgtgaattctaggaccaacactcctgtggagacgtggaaaggttccaaaggcaaacagtcctatacctacatcattgaggagaacactaccacgagcttcacctgggccttccagaggaccacttttcatgaggcaagcaggaagtacaccaatgacgttgccaagatctactccatcaatgtcaccaatgttatgaatggcgtggcctcctactgccgtccctgtgccctagaagcctctgatgtgggctcctcctgcacctcttgtcctgctggttactatattgaccgagattcaggaacctgccactcctgcccccctaacacaattctgaaagcccaccagccttatggtgtccaggcctgtgtgccctgtggtccagggaccaagaacaacaagatccactctctgtgctacaatgattgcaccttctcacgcaacactccaaccaggactttcaactacaacttctccgctttggcaaacaccgtcactcttgctggagggccaagcttcacttccaaagggttgaaatacttccatcactttaccctcagtctctgtggaaaccagggtaggaaaatgtctgtgtgcaccgacaatgtcactgacctccggattcctgagggtgagtcagggttctccaaatctatcacagcctacgtctgccaggcagtcatcatccccccagaggtgacaggctacaaggccggggtttcctcacagcctgtcagccttgctgatcgacttattggggtgacaacagatatgactctggatggaatcacctccccagctgaacttttccacctggagtccttgggaataccggacgtgatcttcttttataggtccaatgatgtgacccagtcctgcagttctgggagatcaaccaccatccgcgtcaggtgcagtccacagaaaactgtccctggaagtttgctgctgccaggaacgtgctcagatgggacctgtgatggctgcaacttccacttcctgtgggagagcgcggctgcttgcccgctctgctcagtggctgactaccatgctatcgtcagcagctgtgtggctgggatccagaagactacttacgtgtggcgagaacccaagctatgctctggtggcatttctctgcctgagcagagagtcaccatctgcaaaaccatagatttctggctgaaagtgggcatctctgcaggcacctgtactgccatcctgctcaccgtcttgacctgctacttttggaaaaagaatcaaaaactagagtacaagtactccaagctggtgatgaatgctactctcaaggactgtgacctgccagcagctgacagctgcgccatcatggaaggcgaggatgtagaggacgacctcatctttaccagcaagaagtcactctttgggaagatcaaatcatttacctccaagaggactcctgatggatttgactcagtgccgctgaagacatcctcaggaggcccagacatggacctgtgagaggcactgcctgcctcacctgcctcctcaccttgcatagcacctttgcaagcctgcggcgatttgggtgccagcatcctgcaacacccactgctggaaatctcttcattgtggccttatcagatgtttgaatttcagatctttttttatagagtacccaaaccctcctttctgcttgcctcaaacctgccaaatatacccacactttgtttgtaaattaaaaaaaaaaaaaaaaaa

SEQ ID NO: 26 - protein, 1013 aa, Homo sapiens
MAEPGHSHHLSARVRGRTERRIPRLWRLLLWAGTAFQVTQGTGPELHACKESEYHYEYTACDSTGSRWRVAVPHTPGLCTSLPDPVKGTECSFSCNAGEFLDMKDQSCKPCAEGRYSLGTGIRFDEWDELPHGFASLSANMELDDSAAESTGNCTSSKWVPRGDYIASNTDECTATLMYAVNLKQSGTVNFEYYYPDSSIIFEFFVQNDQCQPNADDSRWMKTTEKGWEFHSVELNRGNNVLYWRTTAFSVWTKVPKPVLVRNIAITGVAYTSECFPCKPGTYADKQGSSFCKLCPANSYSNKGETSCHQCDPDKYSEKGSSSCNVRPACTDKDYFYTHTACDANGETQLMYKWAKPKICSEDLEGAVKLPASGVKTHCPPCNPGFFKTNNSTCQPCPYGSYSNGSDCTRCPAGTEPAVGFEYKWWNTLPTNMETTVLSGINFEYKGMTGWEVAGDHIYTAAGASDNDFMILTLVVPGFRPPQSVMADTENKEVARITFVFETLCSVNCELYFMVGVNSRTNTPVETWKGSKGKQSYTYIIEENTTTSFTWAFQRTTFHEASRKYTNDVAKIYSINVTNVMNGVASYCRPCALEASDVGSSCTSCPAGYYIDRDSGTCHSCPPNTILKAHQPYGVQACVPCGPGTKNNKIHSLCYNDCTFSRNTPTRTFNYNFSALANTVTLAGGPSFTSKGLKYFHHFTLSLCGNQGRKMSVCTDNVTDLRIPEGESGFSKSITAYVCQAVIIPPEVTGYKAGVSSQPVSLADRLIGVTTDMTLDGITSPAELFHLESLGIPDVIFFYRSNDVTQSCSSGRSTTIRVRCSPQKTVPGSLLLPGTCSDGTCDGCNFHFLWESAAACPLCSVADYHAIVSSCVAGIQKTTYVWREPKLCSGGISLPEQRVTICKTIDFWLKVGISAGTCTAILLTVLTCYFWKKNQKLEYKYSKLVMNATLKDCDLPAADSCAIMEGEDVEDDLIFTSKKSLFGKIKSFTSKRTPDGFDSVPLKTSSGGPDMDL

SEQ ID NO: 27 - DNA, 2998 bp, Homo sapiens
  CDS (218)..(733)
gttcgtcctgggactgcacttgctcccgtcgggtcgcccggcttcaccggacccgcaggctcccggggcagggccggggccagagctcgcgtgtcggcgggacatgcgctgcgtcgcctctaacctcgggctgtgctctttttccaggtggcccgccggtttctgagccttctgccctgcggggacacggtctgcaccctgcccgcggccacggaccatgaccatgaccctccacaccaaagcatctgggatggccctactgcatcagatccaagggaacgagctggagcccctgaaccgtccgcagctcaagatccccctggagcggcccctgggcgaggtgtacctggacagcagcaagcccgccgtgtacaactaccccgagggcgccgcctacgagttcaacgccgcggccgccgccaacgcgcaggtctacggtcagaccggcctcccctacggccccgggtctgaggctgcggcgttcggctccaacggcctggggggtttccccccactcaacagcgtgtctccgagcccgctgatgctactgcacccgccgccgcagctgtcgcctttcctgcagccccacggccagcaggtgccctactacctggagaacgagcccagcggctacacggtgcgcgaggccggcccgccggcattctacagaatggtgctgtcatgtggactgtcctcccgagtgtcccactggatgttcagagaatttatgtgaaggtcacgtcatttagcattgagatgctgtggttaccttcttccatttcttccataatatgcagccacatctatgtgtgaagaaatgtaatagataaaatttctctggacgcataataatgtgagaaagattgtcacatgtcccagcaaattgttattaatataaatttgttacttggcaagctgagattttgcaagatgttactcaaaatttcacaatgaaggaaacagggagtcatcttatcctgggttccttttttagatttcaaacaacttaggaactttgaataaaactaaagatgaagcttaactatatcaactatcctttttaaagttctaattaggaatttaatgctgcatgcttatttcagttttattactcagtattcttaaaagttagacatctctcacttctccaaaaaacttggcaaatgtataaatcttttgcatcaaaatcaatgccctgctaatttgtatcctggccatctgcatattttggacaactaatttttccactggtgatcatttgaaactctttctcaactttgaatagagactgatttccaaagtgagatttaagtgactaagtttcaagtttccgatacatttttccttttacttagataacatttcagcccccttcctttctgatcttacttttttattaatttaaattgttactgattacgtgacactttgtgctggtctaagaatagtccagagtcacatattccctggtgaatgagcatattttcggatgaaaacggaatcacatcttcaatccccatttcattttcacctcctccatgtggcttgtacctgtttggaagaaagctcctgaaggataattgccacttattctaatctttctcacactcatttaatttggatccctggctaaagttgttatttacttttgtgattatacttagtctatgacattcataatttgggaaaattctcaggtttgagaattttggcggcttgggatttcttttagtttcttatagttttaaggatatgtaagacaggtgtaagaaactgccaaggggaggaaccatagatatcaggaaaaactagaaaagatgccagacttaccattaatgaatgatgagacaatagtaactttgttaagtgagattgtatatgtgaaagtggtatagaaactaaacaaacattaggtgtttttattattttactcacatgttaatatttgttttggtgctttcataggctaaaaagctgggaaataacagatttaagtggtcaggaattttgttataaatatagaatgatgattatatgaaatcttttcctgtgaaagtcaaatttaagtaaaatctttatcaccatctgcaacatttgtctgcagcctggcttaccaggttatcataaagaacatttattttacagatacattaaagaaagtcaaaaccctgattatgtgtaaacaattttacataaggaaatatatgaattttaattatatttttctaaaatccgtactcagcatgaaattaatacatcttaacccctccctgtgacttcattattatttttaatgtaactttagaagaacccagtagagagagcagcgtgctaagtgtgtttctttcttttccagacaactttgaatggagaggagcaaattagtcttttggtttaattctgtctcagtttgcttatctaaagaaaggaaaacagagtggctacacttgtttagaaccatatgcatactccagagaaagatgctctattaatccaaaaaatacagccacttgaaaccagccaaagcgaaagtgtaagggacttcatggaaaggaggcagttcaccaaagttattgaggggttttatattttaaactccgccagtgaattgacgtgtaatgtcacttacaaaaaaaaaaaaaagtatgtctgagctgttcgctacttcgtctctaaaatatactcatactgatctctgaaatcccagaatttaagtgggctggaggttacgggaagcacctttataatatccttaatctcatgagggaagaaaccataattgctgaattctctgccttggataatatcaggagggactctgaagaaagttttgcagtaatcaacaatgttttaaattatgtgtatatttttagatcacctcaaaaaatataggaagcacagaatgacaactattctggtctcaactgacacaattttatgtagtttaataaagtaataatttcaagaaacgtgggcaaataaaaaaaaaaaaaaaaaa

SEQ ID NO: 28 - protein, 171 aa, Homo sapiens
MTMTLHTKASGMALLHQIQGNELEPLNRPQLKIPLERPLGEVYLDSSKPAVYNYPEGAAYEFNAAAAANAQVYGQTGLPYGPGSEAAAFGSNGLGGFPPLNSVSPSPLMLLHPPPQLSPFLQPHGQQVPYYLENEPSGYTVREAGPPAFYRMVLSCGLSSRVSHWMFREFM

SEQ ID NO: 29 - DNA, 14955 bp, Homo sapiens
  CDS (95)..(6760)
taggcgcccagggccaggcagcggttgcttccccggcccggctcgcccgcgcttctctccctgtgggcggcggcccggcgcctggaaggtcaagatggaagaaatcctgaggaagctgcagaaggaggcgtccgggagcaagtacaaagccatcaaggagagctgcacctgggccctggaaactctaggtggtctggataccattgccaagatccctccacatgtactgagggagaaatgcctgctgcctctccagttggctttggaatccaagaatgtgaagctggcccaacatgctttggcagggatgcagaagcttctgtcggaagagaggtttgtatccatggaaacagattctgatgagaagcagctgctcaatcagatactgaatgccgtgaaagtgacgccttcgctcaacgaggacctgcaggtggaagtgatgaaggttttactatgcatcacctacacgccaacatttgatctgaatgggagtgccgtgctgaagatcgcggaggtgtgcattgagacgtacataagcagctgtcaccagcgtagcataaacactgctgtgcgggcaactctcagtcaaatgctgagtgacttgactttacagttacgacagaggcaggagaatacgataattgaaaacccagatgtcccacaggatttcgggaatcaagggtcaacagtagagtccctctgtgatgatgttgtctctgtactcaccgtcctgtgtgagaagctgcaagccgccataaagtgcccatctttcctgaccatggcgtgttggaacagtggagctggcactcagattaccatcctaactgagggctctagcaccaactgcagcgaccccatctgggacaccacagcctcgccggtggcagccagtgacagccagcagctgcagcttctctacctggagtgcatcctgtctgtgctcagcagctcctcctcctccatgcacctgcacaggcgcttcacggacctgatctggaaaaacctctgccctgctctcatcgtgatcttggggaatccaattcatgacaaaaccatcacctctgctcacaccagcagcaccagtaccagcctggagtcggactctgcgtctccgggagtgtctgaccacggccgaggatcaggctgctcctgcactgcgccggccctgagcggacctgtggctcggactatctattacatcgcagccgagctggtccggctggtggggtctgtggactccatgaagcccgtgctccagtccctctaccaccgagtgctgctctaccccccaccccagcaccgggtggaagccatcaaaataatgaaagagatacttgggagcccacagcgtctctgtgacttggcaggacccagctccactgaatcagagtccagaaaaagatcaatttcaaaaagaaagtctcatctggatctcctcaaactcatcatggatggcatgaccgaagcatgcatcaagggtggcatcgaagcttgctatgcagccgtgtcctgtgtctgcaccttgctgggtgccctggatgagctcagccaggggaagggcttgagcgaaggtcaggtgcaactgctgcttctgcgccttgaggagctgaaggatggggctgagtggagccgagattccatggagatcaatgaggctgacttccgctggcagcggcgagtgctgtcctcagaacacacgccgtgggagtcagggaacgagaggagccttgacatcagcatcagtgtcaccacagacacaggccagaccactctcgagggagagttgggtcagactacacccgaggaccattcgggaaaccacaagaacagtctcaagtcgccagccatcccagagggtaaggagacgctgagcaaagtattggaaacagaggcggtagaccagccagatgtcgtgcagagaagccacacggtcccttaccctgacataactaacttcctgtcagtagactgcaggacaaggtcctatggatctaggtatagtgagagcaattttagcgttgatgaccaagacctttctaggacagagtttgattcctgtgatcagtactctatggcagcagaaaaggactcgggcaggtccgacgtgtcagacattgggtcggacaactgttcactagccgatgaagagcagacaccccgggactgcctaggccaccggtccctgcgaactgccgccctgtctctaaaactgctgaagaaccaggaggcggatcagcacagcgccaggctgttcatacagtccctggaaggcctcctccctcggctcctgtctctctccaatgtagaggaggtggacaccgctctgcagaactttgcctctactttctgctcaggcatgatgcactctcctggctttgacgggaatagcagcctcagcttccagatgctgatgaacgcagacagcctctacacagctgcacactgcgccctgctcctcaacctgaagctctcccacggtgactactacaggaagcggccgaccctggcgccaggcgtgatgaaggacttcatgaagcaggtgcagaccagcggcgtgctgatggtcttctctcaggcctggattgaggagctctaccatcaggtgctcgacaggaacatgcttggagaggctggctattggggcagcccagaagataacagccttcccctcatcacaatgctgaccgatattgacggcttagagagcagtgccattggtggccagctgatggcctcggctgctacagagtctcctttcgcccagagcaggagaattgatgactccacagtggcaggcgtggcatttgctcgctatattctggtgggctgctggaagaacttgatcgatactttatcaaccccactgactggtcgaatggcggggagctccaaagggctggccttcattctgggagctgaaggcatcaaagagcagaaccagaaggagcgggacgccatctgcatgagcctcgacgggctgcggaaagccgcacggctgagctgcgctctaggcgttgctgctaactgcgcctcagcccttgcccagatggcagctgcctcctgtgtccaagaagaaaaagaagagagggaggcccaagaacccagtgatgccatcacacaagtgaaactaaaagtggagcagaaactggagcagattgggaaggtgcagggggtgtggctgcacactgcccacgtcttgtgcatggaggccatcctcagcgtaggcctggagatgggaagccacaacccggactgctggccacacgtgttcagggtgtgtgaatacgtgggcaccctggagcacaaccacttcagcgatggtgcctcgcagccccctctgaccatcagccagccccagaaggccactggaagcgctggcctccttggggaccccgagtgtgagggctcgccccccgagcacagcccggagcaggggcgctccctgagcacggcccctgtcgtccagcccctgtccatccaggacctcgtccgggaaggcagccggggtcgggcctccgacttccgcggcgggagcctcatgagcgggagcagcgcggccaaggtggtgctcaccctctccacgcaagccgacaggctctttgaagatgctacggataagttgaacctcatggccttgggaggttttctttaccagctgaagaaagcatcgcagtctcagcttttccattctgttacagatacagttgattactctctggcaatgccaggagaagttaaatccactcaagaccgaaaaagcgccctccacctgttccgcctggggaatgccatgctgaggattgtgcggagcaaagcacggcccctgctccacgtgatgcgctgctggagccttgtggccccacacctggtggaggctgcttgccataaggaaagacatgtgtctcagaaggctgtttccttcatccatgacatactgacagaagtcctcactgactggaatgagccacctcattttcacttcaatgaagcactcttccgacctttcgagcgcattatgcagctggaattgtgtgatgaggacgtccaagaccaggttgtcacatccattggtgagctggttgaagtgtgttccacgcagatccagtcgggatggagacccttgttcagtgccctggaaacagtgcatggcgggaacaagtcagagatgaaggagtacctggttggtgactactccatgggaaaaggccaagctccagtgtttgatgtatttgaagcttttctcaatactgacaacatccaggtctttgctaatgcagccactagctacatcatgtgccttatgaagtttgtcaaaggactgggggaggtggactgtaaagagattggagactgtgccccagcacccggagccccgtccacagacctgtgcctcccggccctggattacctcaggcgctgctctcagttattggccaaaatctacaaaatgcccttgaagccaatattccttagtgggagacttgccggcttgcctcgaagacttcaggaacagtcagccagcagtgaggatggaattgaatcagtcctgtctgattttgatgatgacaccggtctgatagaagtctggataatcctgctggagcagctgacagcggctgtgtccaattgtccacggcagcaccaaccaccaactctggatttactctttgagctgttgagagatgtgacgaaaacaccaggaccagggtttggtatctatgcagtggttcacctcctccttcctgtgatgtccgtttggctccgccggagccataaagaccattcctactgggatatggcctctgccaatttcaagcacgctattggtctgtcctgtgagctggtggtggagcacattcaaagctttctacattcagatatcaggtacgagagcatgatcaataccatgctgaaggacctctttgagttgctggtcgcctgtgtggccaagcccactgaaaccatctccagagtgggctgctcctgtattagatacgtccttgtgacagcgggccctgtgttcactgaggagatgtggaggcttgcctgctgtgccctgcaagatgcgttctctgccacactcaagccagtgaaggacctgctgggctgcttccacagcggcacggagagcttcagcggggaaggctgccaggtgcgagtggcggccccgtcctcctccccaagtgccgaggccgagtactggcgcatccgagccatggcccagcaggtgtttatgctggacacccagtgctcaccaaagacaccaaacaactttgaccacgctcagtcctgccagctcattattgagctgcctcctgatgaaaaaccaaatggacacaccaagaaaagcgtgtctttcagggaaattgtggtgagcctgctgtctcatcaggtgttactccagaacttatatgacatcttgttagaagagtttgtcaaaggcccctctcctggagaggaaaagacgatacaagtgccagaagccaagctggctggcttcctcagatacatctctatgcagaacttggcagtcatattcgacctgctgctggactcttataggactgccagggagtttgacaccagccccgggctgaagtgcctgctgaagaaagtgtctggcatcgggggcgccgccaacctctaccgccagtctgcgatgagctttaacatttatttccacgccctggtgtgtgctgttctcaccaatcaagaaaccatcacggccgagcaagtgaagaaggtcctttttgaggacgacgagagaagcacggattcttcccagcagtgttcatctgaggatgaagacatctttgaggaaaccgcccaggtcagccccccgagaggcaaggagaagagacagtggcgggcacggatgcccttgctcagcgtccagcctgtcagcaacgcagattgggtgtggctggtcaagaggctgcacaagctgtgcatggaactgtgcaacaactacatccagatgcacttggacctggagaactgtatggaggagcctcccatcttcaagggcgacccgttcttcatcctgccctccttccagtccgagtcatccaccccatccaccgggggcttctctgggaaagaaaccccttccgaggatgacagaagccagtcccgggagcacatgggcgagtccctgagcctgaaggccggtggtggggacctgctgctgccccccagccccaaagtggagaagaaggatcccagccggaagaaggagtggtgggagaatgcggggaacaaaatctacaccatggcagccgacaagaccatttcaaagttgatgaccgaatacaaaaagaggaaacagcagcacaacctgtccgcgttccccaaagaggtcaaagtggagaagaaaggagagccactgggtcccaggggccaggactccccgctgcttcagcgtccccagcacttgatggaccaagggcaaatgcggcattccttcagcgcaggccccgagctgctgcgacaggacaagaggccccgctcaggctccaccgggagctccctcagtgtctcggtgagagacgcagaagcacagatccaggcatggaccaacatggtgctaacagttctcaatcagattcagattctcccagaccagaccttcacggccctccagcccgcagtgttcccgtgcatcagtcagctgacctgtcacgtgaccgacatcagagttcgccaggctgtgagggagtggctgggcagggtgggccgtgtctatgacatcattgtgtagccgactcctgttctactctcccaccaaataacagtagtgagggttagagtcctgccaatacagctgttgcattttccccaccactagccccacttaaactactactactgtctcagagaacagtgtttcctaatgtaaaaagcctttccaaccactgatcagcattggggccatactaaggtttgtatctagatgacacaaacgatattctgattttgcacattattatagaagaatctataatccttgatatgtttctaactcttgaagtatatttcccagtgcttttgcttacagtgttgtccccaaatgggtcattttcaaggattactcatttgaaaacactatattgatccatttgatccatcatttaaaaaataaatacaattcctaaggcaatatctgctggtaagtcaagctgataaacactcagacatctagtaccagggattattaattggaggaagatttatggttatgggtctggctgggaagaagacaactataaatacatattcttgggtgtcataatcaagaaagaggtgacttctgttgtaaaataatccagaacacttcaaaattattcctaaatcattaagattttcaggtattcaccaatttccccatgtaaggtactgtgttgtacctttatttctgtatttctaaaagaagaaagttctttcctagcagggtttgaagtctgtggcttatcagcctgtgacacagagtacccagtgaaagtggctggtacgtagattgtcaagagacataagaccgaccagccaccctggctgttcttgtggtgtttgtttccatccccaaggcaaacaaggaaaggaaaggaaagaagaaaaggtgccttagtcctttgttgcacttccatttccatgccccacaattgtctgaacataaggtatagcatttggtttttaagaaaacaaaacattaagacgcaactcattttatatcaacacgcttggaggaaagggactcagggaagggagcagggagtgtggggtggggatggattatgatgaaatcattttcaatcttaaaatataatacaacaatcttgcaaaattatggtgtcagttacacaagctctagtctcaaaatgaaagtaatggagaaagacactgaaatttagaaaattttgtcgatttaaaatatttctcctatctaccaagtaaagttaccctatgtttgatgtctttgcattcagaccaatatttcaggtggatatttctaagtattactagaaaatacgtttgaaagctttatcttattatttacagtatttttatatttcttacattatcctaatgattgaaaactcctcaatcaagcttacttacacacattctacagagttatttaaggcatacattataatctcccagccccattcataatgaataagtcaccctttaaatataagacacaaattctacagtattgaaataaggatttaaaggggtatttgtaaactttgccctccttgagaaatatggaactaccttagaggttaagaggaaggcagtgttctgacttctttaggtgatctgaaaaaaacacccttatcatccagtgtaccatctagagatcaccacagaatccatttttttcccagttccacaaaacactctgtttgccttcagtttttactcactagacaataattcaagtttagaaacaggtaatcagctatttgatcttaaaaggcaatgaattgttgggatatcagtgaactatgttgtatacttttgaatttttacattttataaatggaattgaaagttggataactgctttttttaaattttccaacagaagtaacaccacagttgctttgtttctttttatagcttacctgaggttcagttcttctttgtgaacctgtgagtactccacagtttactgggggaaaaggcttcagtaaagcagaggctagaattacagtatttatacatagcaacttttcataaagtagaaaaattcaaaggaagctgtctcaatttgagaataccagctgggcacggtggctcacgcctgtaatcccagcacttactttgggaggccaaggtgggcagataacctgcggtcaggagtttgagaccaggctggacaacatggtgaaacctcgtctctactaaaaatacaaaaattagccaggtgtggtaggatgcacctgtaatcccagctacttaggaggccgagacaggagaatcgctcgaacccaggaggcggacgttgcagtgagccaagattgcaccattgcactccagactgggtgacaagagtgaaactccatctaaaaaaaaaaaaaaaaaaaagtgaatactgtatcccaaagtatgttagttgtttgtttggaaatcagcattctccccgatgctctattatgggatccaaaattcttgaacataagtttaccctgtactgtgtccaaacactgttctagttctagcctgattatgggtcccaagaataaaaggatgagtaggtgtacagagctcttgacctacaattttttaagagtgttttggtaccttcccattgtcttctctataactcagtcctaacatactctgcactcgagttaccagccatccacactgacatcagatttcaaccagaaccatcactgagtgacagcagtacttctcagaggtatttgcagcttgatgcaaagtagtctctaatgagtaggcattcaggtggttcttcccagcaggtggagaagaaagggaggagatgaagaacactgagaggggagtggcaccttcccaggctgcccagctcagtctcttgccctgttcctgtgactcagctgcccactcccccaactttgtttccctccctcccagtctctgaaagtgtcaggtgtttctctcctcacagtctcttttgcagcaacagtaagacaaaattcaaggcagccttttaaagttacgaacagttattagcatgtatttacagacctaagcagaatgagagtttatacattgtttttagttgcctgtatttatagccaaaagtatattaccttaaagttgagatctttctcttcttttcctaaattttggtaaagtgtgcttcatgaaacaaacatctggaaaactccaagtataagagaccctggactgatgatggcccagccaagtatatggagggacagagttctctctgtcattaatgaggacatcggttttcacaattgaacctcatgcactgtccacagcatctcacctagctcctgtatctcctgatctgcttttaaaaatagttagttaggctgcctttttacaccaccttctctctctccccttgtggtaattttccagccttccccatagatataaaactagaacacctttatgatttggggtctatgtaatgactgaccgataagaacccaggcagatgctaacatacttaacagctcgcattaaaatactttaaatcaggcgtgatggctcattcctgtaatctcaagcactttgggaggctaaggtgggtggatctcttgaggtcaggagttcgagaccaacctggccaacgtggtgaaaccccgtctctactaaaaatacaaaattagccgggcatggtggcagctgcctgtaatcccagctactcgggaagctgaggcaggagaattgcttgaacctgggaggtggggattgcagtcagccaagattgttctgcagcatgggtgacaaagtgagacttcgtctcaagtaaataaaactaaaatttttaaatcaaacatgacaaaaatgttaatataattcagaagtaccttgaaattgaaacatatttgtgcaatgatcattaggctttttgtccttgttgttttaaaatgaggcttatacagagtgagttgagagtcaagtagccttcgctgtgagacggtaatgcagttatataatagatacccttgactttgccagattcatcacaatactgcttatacaggaaagttttctcagaaaggaaaatccattagtatcagtcccatcaagccaaacagaatgaagacctttgatagtaatagcaagaggttacaaatagcagggaggaggcgagtagtgaatgtcactgtgattgcaaacccttacctgtattatcacacgtagtcctcacaacaaccttgtgagacaagtgttgtgttcctcattttttcagaggggaacacagacccagagaggttaagaaatttgcccaagataacaagtaaaaggcaaagttggttgcaaaagaggtgtttctgaattcaagggccatactctctctctgacaacatgctctaagtccatagagtaagcactctagtatgaaaaaaagtttcaaggaacgaggccatgaaaatgagactatttgacatctcagatctgtctgggatgttatggaggtttttaaaaataaagttgaaaaaagaaaatgaatcatgtttatacataaaaaaatcacatgtaacacatttcaagtgtttgaaaataaaaccaaaatctaaactttagtcttcaagcagacattcagtgttactttagaaaactcactgaattaggtggaaatgatggaataatactattcatggccagctattaacacagaagaacatggcagtgtgtgtctggaacggcatgcacaatttgtaaacctttttcaaatatcatttaatcaactcagaataaagtgccctgtagccaacagtgcctctttacttgcttctctgggaaatacatggtactaaattagtagcacaaagtttgggaatatgcaaaataatggataaccatttttcaaaatgtacattctctgaagaggaagcagctggttggacaggatttcttgaagagccaggtgctaagggcatcaggtcgacatccatagtaaccatgtgccataacatctacacatttccacttgttttacagacaaggtaacaggcagaaggaaaatccagagtcttgcagtaagcagatgacaaaacttcaatatgcttgggcaccacttaggtgaccccagggagatttagtgtggccttaggaaagcaaaagagcactttttattggaaatatgagcttgtcactgggaaagatttgtaaaattgatcaagaacttgatttataattatgcctcaaaaaaaaaagttctcatttagtagtggagcaatctagaaaacataccttttttgtttgtttggaagatcctctttccctggctgtattgtagtgtttgctatttgatgtggaaataactaataacttaagattttggaacagaacaccctttagatttccaaaacacaattcttatttcagggaagacagaccaaaaatatctcctgagatcattggtttctttataaattgtggtaccactccatcattgaagagaaaccactaccacaccactagcaccatacagaaccttttctctgtatctttgtacaatactacaaaggggtaccagggaggagagagtggctgaccactttagtgacaaaacagcactccactgctggtgaatcccatctaattatggtccttccacccttttcaaccaccaacaactgttcgtactgttaattcctatcctgaaggtttaaccagtggttgtctagtatcttctgtctttagaacagtggttctcaaactttagtacacatcagcatcacctggagggcctttttttaaaataagacacagattgctgggctcatggtcagagttcccagttaagtaaatcaggaaatttgtatttctaacaagtttataggtgaggccaatactgctgttttgggaactatgctttgagaaccactgccttgaaaaaatttccaacttctacctttaagatcagcctgacttatcaaacgctagagaaaaactgaatctacccttgggcagatgacttgggattggattctatacagcagtcttgctcaatcttcccagtttccagttttattataccaacaattggtttttacaagctagaagacaatgaatgtataagttctatggaacagtgagataaatctaagcttcttgtctttgtatttagaaacattgattctatggatgatcatttgtatcatgttgaccctttgacttgtactgaaggtgattttaaatttaagtatgtagtgtttgaatttcttccatccatgtcgttttaatgagatgtttccatgtcagctcctttacagccttggctcctggcttacagatttttgaatagttgtttgcttgccagttgttttacatctttcattggccaccaaaatattagccatttgagatgagatgagactacttgttgtaccttcatctttcatttaattttctggcgtaaattaacattttaatttcatatatatctgtaaagagtctacccaaaggcttcacggaaatttgcaaaatgaactaattcccttttaagcagcaggtgtgcctgtttttgacttttcagtaaatatgttgtttgtgcacatatctacatggtggagaccatattcattatttcatcttccaaataatgggaaaaatataaaagtgaatcagtgtgctttgggaattcagtgaaatcatgttaactcatatagagggggccttagtttatctcttctttactgaattaattagttttggaaattcttttaccattaaaaaaaattaaggaccatacagagaatgatttaagaaaaaacaagtcacttaaaaatcatcacctatttataaactgtattaattacacataatgcttattgattcaatgaggtttctctaaagacttctgcttaataaatatgctgacttcatttaaattagtttagactattgtaggaatggaaggaaatgattatatttactagaattagtgagatcagaaagcatatcagaatgttgatgatatcaaggagacaatctacagagtttttgcctctgtggatggaaataagggtgtttttttttggttttttttttactttagtttcccataatttttggaaattatgtgtgcatttagttcttttagtaacactgattttaaaattaaatttcaaaagtcaatctctaagagtaatttatttttgttttaccaaccagtgccaaaaaggagaggagggaatccaaaagccaatcttttgaaccaatgtgtaaaagattatgttttttcttaaagttagggaggctcgggccctgacactgccagccccagtgagcatccctggctacctcgggattatgtgcaagctgctttgtcctacatttctttcatctggttcttattgggagtgcttctctctaataaaaattgatttcccacaaaataggcaaagctgaacaaagatgaatgcttttgataagttgggtttcacttcagttgaaacaatgtgatagaatatccaggtgtggcatgatggggcaggaggaggtgcctagagggaaaagttatttttgtttcttagtgttgtgttgtggggatgggacagataagaataagatgtttattgccctaatcatgctaagagactattattcaatatgcttttcccgcttttctaagaggaataaacttagacaaattacattataaacagttcccctactactatctcccactctagataaagccagtgggtggtatgggtccttttattccttatagtattatgccaaagaatcaacttattttcattgaagattataaataaatgaagcttgttatagccataatgatttgagtcagtataccattttacctataaaatgcaaaattcatccttgcaaccccattcaccaggagccttgaagcattttgtttactccaaaggccttgtcaaggaagcataattttttgttttgccttcttatttagtcagtttggtcatatttacttaaaaaaacaaactgaaaatcacactcctttatatgttgatataactgattttatagaatctgtctgttctttgtttaacaggtctctgtaagcaagcttgcaagtgtattttgtgtacattttatctgaggtggaaatgaaaattctaaagagaaaatattttaaaagatattgtatttatgttgcttgtgttgtagaataaagattcaaatgcattaaaaatctggtacatgaaacaattgtgtttactgaataaatatatataaatatcaaaaaagcactaaaaa

SEQ ID NO: 30 - protein, 2221 aa, Homo sapiens
MEEILRKLQKEASGSKYKAIKESCTWALETLGGLDTIAKIPPHVLREKCLLPLQLALESKNVKLAQHALAGMQKLLSEERFVSMETDSDEKQLLNQILNAVKVTPSLNEDLQVEVMKVLLCITYTPTFDLNGSAVLKIAEVCIETYISSCHQRSINTAVRATLSQMLSDLTLQLRQRQENTIIENPDVPQDFGNQGSTVESLCDDVVSVLTVLCEKLQAAIKCPSFLTMACWNSGAGTQITILTEGSSTNCSDPIWDTTASPVAASDSQQLQLLYLECILSVLSSSSSSMHLHRRFTDLIWKNLCPALIVILGNPIHDKTITSAHTSSTSTSLESDSASPGVSDHGRGSGCSCTAPALSGPVARTIYYIAAELVRLVGSVDSMKPVLQSLYHRVLLYPPPQHRVEAIKIMKEILGSPQRLCDLAGPSSTESESRKRSISKRKSHLDLLKLIMDGMTEACIKGGIEACYAAVSCVCTLLGALDELSQGKGLSEGQVQLLLLRLEELKDGAEWSRDSMEINEADFRWQRRVLSSEHTPWESGNERSLDISISVTTDTGQTTLEGELGQTTPEDHSGNHKNSLKSPAIPEGKETLSKVLETEAVDQPDVVQRSHTVPYPDITNFLSVDCRTRSYGSRYSESNFSVDDQDLSRTEFDSCDQYSMAAEKDSGRSDVSDIGSDNCSLADEEQTPRDCLGHRSLRTAALSLKLLKNQEADQHSARLFIQSLEGLLPRLLSLSNVEEVDTALQNFASTFCSGMMHSPGFDGNSSLSFQMLMNADSLYTAAHCALLLNLKLSHGDYYRKRPTLAPGVMKDFMKQVQTSGVLMVFSQAWIEELYHQVLDRNMLGEAGYWGSPEDNSLPLITMLTDIDGLESSAIGGQLMASAATESPFAQSRRIDDSTVAGVAFARYILVGCWKNLIDTLSTPLTGRMAGSSKGLAFILGAEGIKEQNQKERDAICMSLDGLRKAARLSCALGVAANCASALAQMAAASCVQEEKEEREAQEPSDAITQVKLKVEQKLEQIGKVQGVWLHTAHVLCMEAILSVGLEMGSHNPDCWPHVFRVCEYVGTLEHNHFSDGASQPPLTISQPQKATGSAGLLGDPECEGSPPEHSPEQGRSLSTAPVVQPLSIQDLVREGSRGRASDFRGGSLMSGSSAAKVVLTLSTQADRLFEDATDKLNLMALGGFLYQLKKASQSQLFHSVTDTVDYSLAMPGEVKSTQDRKSALHLFRLGNAMLRIVRSKARPLLHVMRCWSLVAPHLVEAACHKERHVSQKAVSFIHDILTEVLTDWNEPPHFHFNEALFRPFERIMQLELCDEDVQDQVVTSIGELVEVCSTQIQSGWRPLFSALETVHGGNKSEMKEYLVGDYSMGKGQAPVFDVFEAFLNTDNIQVFANAATSYIMCLMKFVKGLGEVDCKEIGDCAPAPGAPSTDLCLPALDYLRRCSQLLAKIYKMPLKPIFLSGRLAGLPRRLQEQSASSEDGIESVLSDFDDDTGLIEVWIILLEQLTAAVSNCPRQHQPPTLDLLFELLRDVTKTPGPGFGIYAVVHLLLPVMSVWLRRSHKDHSYWDMASANFKHAIGLSCELVVEHIQSFLHSDIRYESMINTMLKDLFELLVACVAKPTETISRVGCSCIRYVLVTAGPVFTEEMWRLACCALQDAFSATLKPVKDLLGCFHSGTESFSGEGCQVRVAAPSSSPSAEAEYWRIRAMAQQVFMLDTQCSPKTPNNFDHAQSCQLIIELPPDEKPNGHTKKSVSFREIVVSLLSHQVLLQNLYDILLEEFVKGPSPGEEKTIQVPEAKLAGFLRYISMQNLAVIFDLLLDSYRTAREFDTSPGLKCLLKKVSGIGGAANLYRQSAMSFNIYFHALVCAVLTNQETITAEQVKKVLFEDDERSTDSSQQCSSEDEDIFEETAQVSPPRGKEKRQWRARMPLLSVQPVSNADWVWLVKRLHKLCMELCNNYIQMHLDLENCMEEPPIFKGDPFFILPSFQSESSTPSTGGFSGKETPSEDDRSQSREHMGESLSLKAGGGDLLLPPSPKVEKKDPSRKKEWWENAGNKIYTMAADKTISKLMTEYKKRKQQHNLSAFPKEVKVEKKGEPLGPRGQDSPLLQRPQHLMDQGQMRHSFSAGPELLRQDKRPRSGSTGSSLSVSVRDAEAQIQAWTNMVLTVLNQIQILPDQTFTALQPAVFPCISQLTCHVTDIRVRQAVREWLGRVGRVYDIIV

SEQ ID NO: 31 - protein, 1522 aa, Homo sapiens
MSVRLPQSIDRLSSLSSLGDSAPERKSPSHHRQPSDASETTGLVQRCVIIQKDQHGFGFTVSGDRIVLVQSVRPGGAAMKAGVKEGDRIIKVNGTMVTNSSHLEVVKLIKSGAYVALTLLGSSPSSMGISGLQQDPSPAGAPRITSVIPSPPPPPPLPPPQRITGPKPLQDPEVQKHATQILRNMLRQEEKELQDILPLYGDTSQRPSEGRLSLDSQEGDSGLDSGTERFPSLSESLMNRNSVLSDPGLDSPRTSPVIMARVAQHHRRQGSDAAVPSTGDQGVDQSPKPLIIGPEEDYDPGYFNNESDIIFQDLEKLKSRPAHLGVFLRYIFSQADPSPLLFYLCAEVYQQASPKDSRSLGKDIWNIFLEKNAPLRVKIPEMLQAEIDSRLRNSEDARGVLCEAQEAAMPEIQEQIHDYRTKRTLGLGSLYGENDLLDLDGDPLRERQVAEKQLAALGDILSKYEEDRSAPMDFALNTYMSHAGIRLREARPSNTAEKAQSAPDKDKWLPFFPKTKKSSNSKKEKDALEDKKRNPILKYIGKPKSSSQSTFHIPLSPVEVKPGNVRNIIQHFENNQQYDAPEPGTQRLSTGSFPEDLLESDSSRSEIRLGRSESLKGREEMKRSRKAENVPRSRSDVDMDAAAEATRLHQSASSSTSSLSTRSLENPTPPFTPKMGRRSIESPSLGFCTDTLLPHLLEDDLGQLSDLEPEPDAQNWQHTVGKDVVAGLTQREIDRQEVINELFVTEASHLRTLRVLDLIFYQRMKKENLMPREELARLFPNLPELIEIHNSWCEAMKKLREEGPIIKEISDLMLARFDGPAREELQQVAAQFCSYQSIALELIKTKQRKESRFQLFMQEAESHPQCRRLQLRDLIISEMQRLTKYPLLLESIIKHTEGGTSEHEKLCRARDQCREILKYVNEAVKQTENRHRLEGYQKRLDATALERASNPLAAEFKSLDLTTRKMIHEGPLTWRISKDKTLDLHVLLLEDLLVLLQKQDEKLLLKCHSKTAVGSSDSKQTFSPVLKLNAVLIRSVATDKRAFFIICTSKLGPPQIYELVALTSSDKNTWMELLEEAVRNATRHPGAAPMPVHPPPPGPREPAQQGPTPSRVELDDSDVFHGEPEPEELPGGTGSQQRVQGKHQVLLEDPEQEGSAEEEELGVLPCPSTSLDGENRGIRTRNPIHLAFPGPLFMEGLADSALEDVENLRHLILWSLLPGHTMETQAAQEPEDDLTPTPSVISVTSHPWDPGSPGQAPPGGEGDNTQLAGLEGERPEQEDMGLCSLEHLPPRTRNSGIWESPELDRNLAEDASSTEAAGGYKVVRKAEVAGSKVVPALPESGQSEPGPPEVEGGTKATGNCFYVSMPSGPPDSSTDHSEAPMSPPQPDSLPAGQTEPQPQLQGGNDDPRRPSRSPPSLALRDVGMIFHTIEQLTLKLNRLKDMELAHRELLKSLGGESSGGTTPVGSFHTEAARWTDGSLSPPAKEPLASDSRNSHELGPCPEDGSDAPLEDSTADAAASPGP

SEQ ID NO: 32 - protein, 577 aa, Homo sapiens
MCKEQKATKKSKVGFLDPLATDNQKECEAWPDLRTSEEDSKSCSGALSTALEELAKVSEELCSFQEEIRKRSNHRRMKSDSFLQEMPNVTNIPHGDPMINNDQCILPISLEKEKQKNRKNLSCTNVLQSNSTKKCGIDTIDLKRNETPPVPPPRSTSRNFPSSDSEQAYERWKERLDHNSWVPHEGRSKRNYNPHFPLRQQEMSMLYPNEGKTSKDGIIFSSLVPEVKIDSKPPSNEDVGLSMWSCDIGIGAKRSPSTSWFQKTCSTPSNPKYEMVIPDHPAKSHPDLHVSNDCSSSVAESSSPLRNFSCGFERTTRNEKLAAKTDEFNRTVFRTDRNCQAIQQNHSCSKSSEDLKPCDTSSTHTGSISQSNDVSGIWKTNAHMPVPMENVPDNPTKKSTTGLVRQMQGHLSPRSYRNMLHEHDWRPSNLSGRPRSADPRSNYGVVEKLLKTYETATESALQNSKCFQDNWTKCNSDVSGGATLSQHLEMLQMEQQFQQKTAVWGGQEVKQGIDPKKITEESMSVNASHGKGFSRPARPANRRLPSRWASRSPSAPPALRRTTHNYTISLRSEALMV

SEQ ID NO: 33 - protein, 248 aa, Homo sapiens
MGMERPAAREPHGPDALRRFQGLLLDRRGRLHRQVLRLREVARRLERLRRRSLVANVAGSSLSATGALAAIVGLSLSPVTLGTSLLVSAVGLGVATAGGAVTITSDLSLIFCNSRELRRVQEIAATCQDQMREILSCLEFFCRWQGCGDRQLLQCGRNASIALYNSVYFIVFFGSRGFLIPRRAEGDTKVSQAVLKAKIQKLAESLESCTGALDELSEQLESRVQLCTKSSRGHDLKISADQRAGLFF

SEQ ID NO: 34 - protein, 2158 aa, Homo sapiens
MVSIDLHQAGRVDSQASITQDSDSIKKPEEIKQCNDAPVSVLQEDIVGSLKSTPENHPETPKKKSDPELSKSEMKQSESRLAESKPNENRLVETKSSENKLETKVETQTEELKQNESRTTECKQNESTIVEPKQNENRLSDTKPNDNKQNNGRSETTKSRPETPKQKGESRPETPKQKSDGHPETPKQKGDGRPETPKQKGESRPETPKQKNEGRPETPKHRHDNRRDSGKPSTEKKPEVSKHKQDTKSDSPRLKSERAEALKQRPDGRSVSESLRRDHDNKQKSDDRGESERHRGDQSRVRRPETLRSSSRNEHGIKSDSSKTDKLERKHRHESGDSRERPSSGEQKSRPDSPRVKQGDSNKSRSDKLGFKSPTSKDDKRTEGNKSKVDTNKAHPDNKAEFPSYLLGGRSGALKNFVIPKIKRDKDGNVTQETKKMEMKGEPKDKVEKIGLVEDLNKGAKPVVVLQKLSLDDVQKLIKDREDKSRSSLKPIKNKPSKSNKGSIDQSVLKELPPELLAEIESTMPLCERVKMNKRKRSTVNEKPKYAEISSDEDNDSDEAFESSRKRHKKDDDKAWEYEERDRRSSGDHRRSGHSHEGRRSSGGGRYRNRSPSDSDMEDYSPPPSLSEVARKMKKKEKQKKRKAYEPKLTPEEMMDSSTFKRFTASIENILDNLEDMDFTAFGDDDEIPQELLLGKHQLNELGSESAKIKAMGIMDKLSTDKTVKVLNILEKNIQDGSKLSTLLNHNNDTEEEERLWRDLIMERVTKSADACLTTINIMTSPNMPKAVYIEDVIERVIQYTKFHLQNTLYPQYDPVYRLDPHGGGLLSSKAKRAKCSTHKQRVIVMLYNKVCDIVSSLSELLEIQLLTDTTILQVSSMGITPFFVENVSELQLCAIKLVTAVFSRYEKHRQLILEEIFTSLARLPTSKRSLRNFRLNSSDMDGEPMYIQMVTALVLQLIQCVVHLPSSEKDSNAEEDSNKKIDQDVVITNSYETAMRTAQNFLSIFLKKCGSKQGEEDYRPLFENFVQDLLSTVNKPEWPAAELLLSLLGRLLVHQFSNKSTEMALRVASLDYLGTVAARLRKDAVTSKMDQGSIERILKQVSGGEDEIQQLQKALLDYLDENTETDPSLVFSRKFYIAQWFRDTTLETEKAMKSQKDEESSEGTHHAKEIETTGQIMHRAENRKKFLRSIIKTTPSQFSTLKMNSDTVDYDDACLIVRYLASMRPFAQSFDIYLTQILRVLGENAIAVRTKAMKCLSEVVAVDPSILARLDMQRGVHGRLMDNSTSVREAAVELLGRFVLCRPQLAEQYYDMLIERILDTGISVRKRVIKILRDICIEQPTFPKITEMCVKMIRRVNDEEGIKKLVNETFQKLWFTPTPHNDKEAMTRKILNITDVVAACRDTGYDWFEQLLQNLLKSEEDSSYKPVKKACTQLVDNLVEHILKYEESLADSDNKGVNSGRLVACITTLFLFSKIRPQLMVKHAMTMQPYLTTKCSTQNDFMVICNVAKILELVVPLMEHPSETFLATIEEDLMKLIIKYGMTVVQHCVSCLGAVVNKVTQNFKFVWACFNRYYGAISKLKSQHQEDPNNTSLLTNKPALLRSLFTVGALCRHFDFDLEDFKGNSKVNIKDKVLELLMYFTKHSDEEVQTKAIIGLGFAFIQHPSLMFEQEVKNLYNNILSDKNSSVNLKIQVLKNLQTYLQEEDTRMQQADRDWKKVAKQEDLKEMGDVSSGMSSSIMQLYLKQVLEAFFHTQSSVRHFALNVIALTLNQGLIHPVQCVPYLIAMGTDPEPAMRNKADQQLVEIDKKYAGFIHMKAVAGMKMSYQVQQAINTCLKDPVRGFRQDESSSALCSHLYSMIRGNRQHRRAFLISLLNLFDDTAKTDVTMLLYIADNLACFPYQTQEEPLFIMHHIDITLSVSGSNLLQSFKESMVKDKRKERKSSPSKENESSDSEEEVSRPRKSRKRVDSDSDSDSEDDINSVMKCLPENSAPLIEFANVSQGILLLLMLKQHLKNLCGFSDSKIQKYSPSESAKVYDKAINRKTGVHFHPKQTLDFLRSDMANSKITEEVKRSIVKQYLDFKLLMEHLDPDEEEEEGEVSASTNARNKAITSLLGGGSPKNNTAAETEDDESDGEDRGGGTSGVRRRRSQRISQRIT

SEQ ID NO: 35 - protein, 2265 aa, Homo sapiens
MVSIDLHQAGRVDSQASITQDSDSIKKPEEIKQCNDAPVSVLQEDIVGSLKSTPENHPETPKKKSDPELSKSEMKQSESRLAESKPNENRLVETKSSENKLETKVETQTEELKQNESRTTECKQNESTIVEPKQNENRLSDTKPNDNKQNNGRSETTKSRPETPKQKGESRPETPKQKSDGHPETPKQKGDGRPETPKQKGESRPETPKQKNEGRPETPKHRHDNRRDSGKPSTEKKPEVSKHKQDTKSDSPRLKSERAEALKQRPDGRSVSESLRRDHDNKQKSDDRGESERHRGDQSRVRRPETLRSSSRNEHGIKSDSSKTDKLERKHRHESGDSRERPSSGEQKSRPDSPRVKQGDSNKSRSDKLGFKSPTSKDDKRTEGNKSKVDTNKAHPDNKAEFPSYLLGGRSGALKNFVIPKIKRDKDGNVTQETKKMEMKGEPKDKVEKIGLVEDLNKGAKPVVVLQKLSLDDVQKLIKDREDKSRSSLKPIKNKPSKSNKGSIDQSVLKELPPELLAEIESTMPLCERVKMNKRKRSTVNEKPKYAEISSDEDNDSDEAFESSRKRHKKDDDKAWEYEERDRRSSGDHRRSGHSHEGRRSSGGGRYRNRSPSDSDMEDYSPPPSLSEVARKMKKKEKQKKRKAYEPKLTPEEMMDSSTFKRFTASIENILDNLEDMDFTAFGDDDEIPQELLLGKHQLNELGSESAKIKAMGIMDKLSTDKTVKVLNILEKNIQDGSKLSTLLNHNNDTEEEERLWRDLIMERVTKSADACLTTINIMTSPNMPKAVYIEDVIERVIQYTKFHLQNTLYPQYDPVYRLDPHGGGLLSSKAKRAKCSTHKQRVIVMLYNKVCDIVSSLSELLEIQLLTDTTILQVSSMGITPFFVENVSELQLCAIKLVTAVFSRYEKHRQLILEEIFTSLARLPTSKRSLRNFRLNSSDMDGEPMYIQMVTALVLQLIQCVVHLPSSEKDSNAEEDSNKKIDQDVVITNSYETAMRTAQNFLSIFLKKCGSKQGEEDYRPLFENFVQDLLSTVNKPEWPAAELLLSLLGRLLVHQFSNKSTEMALRVASLDYLGTVAARLRKDAVTSKMDQGSIERILKQVSGGEDEIQQLQKALLDYLDENTETDPSLVFSRKFYIAQWFRDTTLETEKAMKSQKDEESSEGTHHAKEIETTGQIMHRAENRKKFLRSIIKTTPSQFSTLKMNSDTVDYDDACLIVRYLASMRPFAQSFDIYLTQILRVLGENAIAVRTKAMKCLSEVVAVDPSILARLDMQRGVHGRLMDNSTSVREAAVELLGRFVLCRPQLAEQYYDMLIERILDTGISVRKRVIKILRDICIEQPTFPKITEMCVKMIRRVNDEEGIKKLVNETFQKLWFTPTPHNDKEAMTRKILNITDVVAACRDTGYDWFEQLLQNLLKSEEDSSYKPVKKACTQLVDNLVEHILKYEESLADSDNKGVNSGRLVACITTLFLFSKIRPQLMVKHAMTMQPYLTTKCSTQNDFMVICNVAKILELVVPLMEHPSETFLATIEEDLMKLIIKYGMTVVQHCVSCLGAVVNKVTQNFKFVWACFNRYYGAISKLKSQHQEDPNNTSLLTNKPALLRSLFTVGALCRHFDFDLEDFKGNSKVNIKDKVLELLMYFTKHSDEEVQTKAIIGLGFAFIQHPSLMFEQEVKNLYNNILSDKNSSVNLKIQVLKNLQTYLQEEDTRMQQADRDWKKVAKQEDLKEMGDVSSGMSSSIMQLYLKQVLEAFFHTQSSVRHFALNVIALTLNQGLIHPVQCVPYLIAMGTDPEPAMRNKADQQLVEIDKKYAGFIHMKAVAGMKMSYQVQQAINTCLKDPVRGFRQDESSSALCSHLYSMIRGNRQHRRAFLISLLNLFDDTAKTDVTMLLYIADNLACFPYQTQEEPLFIMHHIDITLSVSGSNLLQSFKESMVKDKRKERKSSPSKENESSDSEEEVSRPRKSRKRVDSDSDSDSEDDINSVMKCLPENSAPLIEFANVSQGILLLLMLKQHLKNLCGFSDSKIQKYSPSESAKVYDKAINRKTGVHFHPKQTLDFLRSDMANSKITEEVKRSIVKQYLDFKLLMEHLDPDEEEEEGEVSASTNARNKAITSLLGGGSPKNNTAAETEDDESDGEDRGGGTSGSLRRSKRNSDSTELAAQMNESVDVMDVIAICCPKYKDRPQIARVVQKTSSGFSVQWMAGSYSGSWTEAKRRDGRKLVPWVDTIKESDIIYKKIALTSANKLTNKVVQTLRSLYAAKDGTSS

SEQ ID NO: 36 - protein, 1007 aa, Homo sapiens
MSRRKQRKPQQLISDCEGPSASENGDASEEDHPQVCAKCCAQFTDPTEFLAHQNACSTDPPVMVIIGGQENPNNSSASSEPRPEGHNNPQVMDTEHSNPPDSGSSVPTDPTWGPERRGEESPGHFLVAATGTAAGGGGGLILASPKLGATPLPPESTPAPPPPPPPPPPPGVGSGHLNIPLILEELRVLQQRQIHQMQMTEQICRQVLLLGSLGQTVGAPASPSELPGTGTASSTKPLLPLFSPIKPVQTSKTLASSSSSSSSSSGAETPKQAFFHLYHPLGSQHPFSAGGVGRSHKPTPAPSPALPGSTDQLIASPHLAFPSTTGLLAAQCLGAARGLEATASPGLLKPKNGSGELSYGEVMGPLEKPGGRHKCRFCAKVFGSDSALQIHLRSHTGERPYKCNVCGNRFTTRGNLKVHFHRHREKYPHVQMNPHPVPEHLDYVITSSGLPYGMSVPPEKAEEEAATPGGGVERKPLVASTTALSATESLTLLSTSAGTATAPGLPAFNKFVLMKAVEPKNKADENTPPGSEGSAISGVAESSTATRMQLSKLVTSLPSWALLTNHFKSTGSFPFPYVLEPLGASPSETSKLQQLVEKIDRQGAVAVTSAASGAPTTSAPAPSSSASSGPNQCVICLRVLSCPRALRLHYGQHGGERPFKCKVCGRAFSTRGNLRAHFVGHKASPAARAQNSCPICQKKFTNAVTLQQHVRMHLGGQIPNGGTALPEGGGAAQENGSEQSTVSGAGSFPQQQSQQPSPEEELSEEEEEEDEEEEEDVTDEDSLAGRGSESGGEKAISVRGDSEEASGAEEEVGTVAAAATAGKEMDSNEKTTQQSSLPPPPPPDSLDQPQPMEQGSSGVLGGKEEGGKPERSSSPASALTPEGEATSVTLVEELSLQEAMRKEPGESSSRKACEVCGQAFPSQAALEEHQKTHPKEGPLFTCVFCRQGFLERATLKKHMLLAHHQVQPFAPHGPQNIAALSLVPGCSPSITSTGLSPFPRKDDPTIP

SEQ ID NO: 37 - protein, 121 aa, Homo sapiens
MNAPRICSEYDEEEVDYEESDSDESWTTESAISSEAILSSMCMNGGEEKPFACPVPGCKKRYKNVNGIKYHAKNGHRTQIRVRKPFKCRCGKSYKTAQGLRHHTINFHPPVSAEIIRKMQQ

SEQ ID NO: 38 - protein, 736 aa, Homo sapiens
MEALIPVINKLQDVFNTVGADIIQLPQIVVVGTQSSGKSSVLESLVGRDLLPRGTGIVTRRPLILQLVHVTQEDKRKTTGEENGVEAEEWGKFLHTKNKLYTDFDEIRQEIENETERISGNNKGVSPEPIHLKIFSPNVVNLTLVDLPGMTKVPVGDQPKDIELQIRELILRFISNPNSIILAVTAANTDMATSEALKISREVDPDGRRTLAVITKLDLMDAGTDAMDVLMGRVIPVKLGIIGVVNRSQLDINNKKSVTDSIRDEYAFLQKKYPSLANRNGTKYLARTLNRLLMHHIRDCLPELKTRINVLAAQYQSLLNSYGEPVDDKSATLLQLITKFATEYCNTIEGTAKYIETSELCGGARICYIFHETFGRTLESVDPLGGLNTIDILTAIRNATGPRPALFVPEVSFELLVKRQIKRLEEPSLRCVELVHEEMQRIIQHCSNYSTQELLRFPKLHDAIVEVVTCLLRKRLPVTNEMVHNLVAIELAYINTKHPDFADACGLMNNNIEEQRRNRLARELPSAVSRDKSSKVPSALAPASQEPSPAASAEADGKLIQDSRRETKNVASGGGGVGDGVQEPTTGNWRGMLKTSKAEELLAEEKSKPIPIMPASPQKGHAVNLLDVPVPVARKLSAREQRDCEVIERLIKSYFLIVRKNIQDSVPKAVMHFLVNHVKDTLQSELVGQLYKSSLLDDLLTESEDMAQRRKEAADMLKALQGASQIIAEIRETHLW

SEQ ID NO: 39 - protein, 710 aa, Homo sapiens
MEALIPVINKLQDVFNTVGADIIQLPQIVVVGTQSSGKSSVLESLVGRDLLPRGTGIVTRRPLILQLVHVTQEDKRKTTGEENGVEAEEWGKFLHTKNKLYTDFDEIRQEIENETERISGNNKGVSPEPIHLKIFSPNVVNLTLVDLPGMTKVPVGDQPKDIELQIRELILRFISNPNSIILAVTAANTDMATSEALKISREVDPDGRRTLAVITKLDLMDAGTDAMDVLMGRVIPVKLGIIGVVNRSQLDINNKKSVTDSIRDEYAFLQKKYPSLANRNGTKYLARTLNRLLMHHIRDCLPELKTRINVLAAQYQSLLNSYGEPVDDKSATLLQLITKFATEYCNTIEGTAKYIETSELCGGARICYIFHETFGRTLESVDPLGGLNTIDILTAIRNATGPRPALFVPEVSFELLVKRQIKRLEEPSLRCVELVHEEMQRIIQHCSNYSTQELLRFPKLHDAIVEVVTCLLRKRLPVTNEMVHNLVAIELAYINTKHPDFADACGLMNNNIEEQRRNRLARELPSAVSRDKLIQDSRRETKNVASGGGGVGDGVQEPTTGNWRGMLKTSKAEELLAEEKSKPIPIMPASPQKGHAVNLLDVPVPVARKLSAREQRDCEVIERLIKSYFLIVRKNIQDSVPKAVMHFLVNHVKDTLQSELVGQLYKSSLLDDLLTESEDMAQRRKEAADMLKALQGASQIIAEIRETHLW

SEQ ID NO: 40 - protein, 699 aa, Homo sapiens
MEALIPVINKLQDVFNTVGADIIQLPQIVVVGTQSSGKSSVLESLVGRDLLPRGTGIVTRRPLILQLVHVTQEDKRKTTGEENGVEAEEWGKFLHTKNKLYTDFDEIRQEIENETERISGNNKGVSPEPIHLKIFSPNVVNLTLVDLPGMTKVPVGDQPKDIELQIRELILRFISNPNSIILAVTAANTDMATSEALKISREVDPDGCRTLAVITKLDLMDAGTDAMDVLMGRVIPVKLGIIGVVNRSQLDINNKKSVTDSIRDEYAFLQKKYPSLANRNGTKYLARTLNRLLMHHIRDCLPELKTRINVLAAQYQSLLNSYGEPVDDKSATLLQLITKFATEYCNTIEGTAKYIETSELCGGARICYIFHETFGRTLESVDPLGGLNTIDILTAIRNATGPRPALFVPEVSFELLVKRQIKRLEEPSLRCVELVHEEMQRIIQHCSNYSTQELLRFPKLHDAIVEVVTCLLRKRLPVTNEMVHNLVAIELAYINTKHPDFADACGLMNNNIEEQRRNRLARELPSAVSRDKVASGGGGVGDGVQEPTTGNWRGMLKTSKAEELLAEEKSKPIPIMPASPQKGHAVNLLDVPVPVARKLSAREQRDCEVIERLIKSYFLIVRKNIQDSVPKAVMHFLVNHVKDTLQSELVGQLYKSSLLDDLLTESEDMAQRRKEAADMLKALQGASQIIAEIRETHLW

SEQ ID NO: 41 - protein, 954 aa, Homo sapiens
MAEPGHSHHLSARVRGRTERRIPRLWRLLLWAGTAFQVTQGTGPELHACKESEYHYEYTACDSTGSRWRVAVPHTPGLCTSLPDPIKGTECSFSCNAGEFLDMKDQSCKPCAEGRYSLGTGIRFDEWDELPHGFASLSANMELDDSAAESTGNCTSSKWVPRGDYIASNTDECTATLMYAVNLKQSGTVNFEYYYPDSSIIFEFFVQNDQCQPNADDSRWMKTTEKGWEFHSVELNRGNNVLYWRTTAFSVWTKVPKPVLVRNIAITEKGSSSCNVRPACTDKDYFYTHTACDANGETQLMYKWAKPKICSEDLEGAVKLPASGVKTHCPPCNPGFFKTNNSTCQPCPYGSYSNGSDCTRCPAGTEPAVGFEYKWWNTLPTNMETTVLSGINFEYKGMTGWEVAGDHIYTAAGASDNDFMILTLVVPGFRPPQSVMADTENKEVARITFVFETLCSVNCELYFMVGVNSRTNTPVETWKGSKGKQSYTYIIEENTTTSFTWAFQRTTFHEASRKYTNDVAKIYSINVTNVMNGVASYCRPCALEASDVGSSCTSCPAGYYIDRDSGTCHSCPTNTILKAHQPYGVQACVPCGPGTKNNKIHSLCYNDCTFSRNTPTRTFNYNFSALANTVTLAGGPSFTSKGLKYFHHFTLSLCGNQGRKMSVCTDNVTDLRIPEGESGFSKSITAYVCQAVIIPPEVTGYKAGVSSQPVSLADRLIGVTTDMTLDGITSPAELFHLESLGIPDVIFFYRSNDVTQSCSSGRSTTIRVRCSPQKTVPGSLLLPGTCSDGTCDGCNFHFLWESAAACPLCSVADYHAIVSSCVAGIQKTTYVWREPKLCSGGISLPEQRVTICKTIDFWLKVGISAGTCTAILLTVLTCYFWKKNQKLEYKYSKLVMNATLKDCDLPAADSCAIMEGEDVEDDLIFTSKKSLFGKIKSFTSKQPAPVTISLSEDS

SEQ ID NO: 42 - protein, 595 aa, Homo sapiens
MTMTLHTKASGMALLHQIQGNELEPLNRPQLKIPLERPLGEVYLDSSKPAVYNYPEGAAYEFNAAAAANAQVYGQTGLPYGPGSEAAAFGSNGLGGFPPLNSVSPSPLMLLHPPPQLSPFLQPHGQQVPYYLENEPSGYTVREAGPPAFYRPNSDNRRQGGRERLASTNDKGSMAMESAKETRYCAVCNDYASGYHYGVWSCEGCKAFFKRSIQGHNDYMCPATNQCTIDKNRRKSCQACRLRKCYEVGMMKGGIRKDRRGGRMLKHKRQRDDGEGRGEVGSAGDMRAANLWPSPLMIKRSKKNSLALSLTADQMVSALLDAEPPILYSEYDPTRPFSEASMMGLLTNLADRELVHMINWAKRVPGFVDLTLHDQVHLLECAWLEILMIGLVWRSMEHPVKLLFAPNLLLDRNQGKCVEGMVEIFDMLLATSSRFRMMNLQGEEFVCLKSIILLNSGVYTFLSSTLKSLEEKDHIHRVLDKITDTLIHLMAKAGLTLQQQHQRLAQLLLILSHIRHMSNKGMEHLYSMKCKNVVPLYDLLLEMLDAHRLHAPTSRGGASVEETDQSHLATAGSTSSHSLQKYYITGEAEGFPATV

SEQ ID NO: 43 - protein, 1575 aa, Homo sapiens
MIKDWTKEHVKKWVNEDLKINEQYGQILLSEEVTGLVLQELTEKDLVEMGLPWGPALLIKRSYNKLNSKSPESDNHDPGQLDNSKPSKTEHQKNPKHTKKEEENSMSSNIDYDPREIRDIKQEESILMKENVLDEVANAKHKKKGKLKPEQLTCMPYPFDQFHDSHRYIEHYTLQPETGALNLIDPIHEFKALTNTETATEVDIKMKFSNEVFRFASACMNSRTNGTIHFGVKDKPHGEIVGVKITSKAAFIDHFNVMIKKYFEESEINEAKKCIREPRFVEVLLQNNTPSDRFVIEVDTIPKHSICNDKYFYIQMQICKDKIWKQNQNLSLFVREGASSRDILANSKQRDVDFKAFLQNLKSLVASRKEAEEEYGMKAMKKESEGLKLVKLLIGNRDSLDNSYYDWYILVTNKCHPNQIKHLDFLKEIKWFAVLEFDPESMINGVVKAYKESRVANLHFPNQYEDKTTNMWEKISTLNLYQQPSWIFCNGRSDLKSETYKPLEPHLWQRERASEVRKLILFLTDENIMTRGKFLVVFLLLSSVESPGDPLIETFWAFYQALKGMENMLCISVNSHIYQRWKDLLQTRMKMEDELTNHSISTLNIELVNSTILKLKSVTRSSRRFLPARGSSSVILEKKKEDVLTALEILCENECTETDIEKDKSKFLEFKKSKEEHFYRGGKVSWWNFYFSSENYSSDFVKRDSYEKLKDLIHCWAESPKPIFAKIINLYHHPGCGGTTLAMHVLWDLKKNFRCAVLKNKTTDFAEIAEQVINLVTYRAKSHQDYIPVLLLVDDFEEQENVYFLQNAIHSVLAEKDLRYEKTLVIILNCMRSRNPDESAKLADSIALNYQLSSKEQRAFGAKLKEIEKQHKNCENFYSFMIMKSNFDETYIENVVRNILKGQDVDSKEAQLISFLALLSSYVTDSTISVSQCEIFLGIIYTSTPWEPESLEDKMGTYSTLLIKTEVAEYGRYTGVRIIHPLIALYCLKELERSYHLDKCQIALNILEENLFYDSGIGRDKFQHDVQTLLLTRQRKVYGDETDTLFSPLMEALQNKDIEKVLSAGSRRFPQNAFICQALARHFYIKEKDFNTALDWARQAKMKAPKNSYISDTLGQVYKSEIKWWLDGNKNCRSITVNDLTHLLEAAEKASRAFKESQRQTDSKNYETENWSPQKSQRRYDMYNTACFLGEIEVGLYTIQILQLTPFFHKENELSKKHMVQFLSGKWTIPPDPRNECYLALSKFTSHLKNLQSDLKRCFDFFIDYMVLLKMRYTQKEIAEIMLSKKVSRCFRKYTELFCHLDPCLLQSKESQLLQEENCRKKLEALRADRFAGLLEYLNPNYKDATTMESIVNEYAFLLQQNSKKPMTNEKQNSILANIILSCLKPNSKLIQPLTTLKKQLREVLQFVGLSHQYPGPYFLACLLFWPENQELDQDSKLIEKYVSSLNRSFRGQYKRMCRSKQASTLFYLGKRKGLNSIVHKAKIEQYFDKAQNTNSLWHSGDVWKKNEVKDLLRRLTGQAEGKLISVEYGTEEKIKIPVISVYSGPLRSGRNIERVSFYLGFSIEGPLAYDIEVI

SEQ ID NO: 44 - protein, 1770 aa, Homo sapiens
MDGMTEACIKGGIEACYAAVSCVCTLLGALDELSQGKGLSEGQVQLLLLRLEELKDGAEWSRDSMEINEADFRWQRRVLSSEHTPWESGNERSLDISISVTTDTGQTTLEGELGQTTPEDHSGNHKNSLKSPAIPEGKETLSKVLETEAVDQPDVVQRSHTVPYPDITNFLSVDCRTRSYGSRYSESNFSVDDQDLSRTEFDSCDQYSMAAEKDSGRSDVSDIGSDNCSLADEEQTPRDCLGHRSLRTAALSLKLLKNQEADQHSARLFIQSLEGLLPRLLSLSNVEEVDTALQNFASTFCSGMMHSPGFDGNSSLSFQMLMNADSLYTAAHCALLLNLKLSHGDYYRKRPTLAPGVMKDFMKQVQTSGVLMVFSQAWIEELYHQVLDRNMLGEAGYWGSPEDNSLPLITMLTDIDGLESSAIGGQLMASAATESPFAQSRRIDDSTVAGVAFARYILVGCWKNLIDTLSTPLTGRMAGSSKGLAFILGAEGIKEQNQKERDAICMSLDGLRKAARLSCALGVAANCASALAQMAAASCVQEEKEEREAQEPSDAITQVKLKVEQKLEQIGKVQGVWLHTAHVLCMEAILSVGLEMGSHNPDCWPHVFRVCEYVGTLEHNHFSDGASQPPLTISQPQKATGSAGLLGDPECEGSPPEHSPEQGRSLSTAPVVQPLSIQDLVREGSRGRASDFRGGSLMSGSSAAKVVLTLSTQADRLFEDATDKLNLMALGGFLYQLKKASQSQLFHSVTDTVDYSLAMPGEVKSTQDRKSALHLFRLGNAMLRIVRSKARPLLHVMRCWSLVAPHLVEAACHKERHVSQKAVSFIHDILTEVLTDWNEPPHFHFNEALFRPFERIMQLELCDEDVQDQVVTSIGELVEVCSTQIQSGWRPLFSALETVHGGNKSEMKEYLVGDYSMGKGQAPVFDVFEAFLNTDNIQVFANAATSYIMCLMKFVKGLGEVDCKEIGDCAPAPGAPSTDLCLPALDYLRRCSQLLAKIYKMPLKPIFLSGRLAGLPRRLQEQSASSEDGIESVLSDFDDDTGLIEVWIILLEQLTAAVSNCPRQHQPPTLDLLFELLRDVTKTPGPGFGIYAVVHLLLPVMSVWLRRSHKDHSYWDMASANFKHAIGLSCELVVEHIQSFLHSDIRYESMINTMLKDLFELLVACVAKPTETISRVGCSCIRYVLVTAGPVFTEEMWRLACCALQDAFSATLKPVKDLLGCFHSGTESFSGEGCQVRVAAPSSSPSAEAEYWRIRAMAQQVFMLDTQCSPKTPNNFDHAQSCQLIIELPPDEKPNGHTKKSVSFREIVVSLLSHQVLLQNLYDILLEEFVKGPSPGEEKTIQVPEAKLAGFLRYISMQNLAVIFDLLLDSYRTAREFDTSPGLKCLLKKVSGIGGAANLYRQSAMSFNIYFHALVCAVLTNQETITAEQVKKVLFEDDERSTDSSQQCSSEDEDIFEETAQVSPPRGKEKRQWRARMPLLSVQPVSNADWVWLVKRLHKLCMELCNNYIQMHLDLENCMEEPPIFKGDPFFILPSFQSESSTPSTGGFSGKETPSEDDRSQSREHMGESLSLKAGGGDLLLPPSPKVEKKDPSRKKEWWENAGNKIYTMAADKTISKLMTEYKKRKQQHNLSAFPKEVKVEKKGEPLGPRGQDSPLLQRPQHLMDQGQMRHSFSAGPELLRQDKRPRSGSTGSSLSVSVRDAEAQIQAWTNMVLTVLNQIQILPDQTFTALQPAVFPCISQLTCHVTDIRVRQAVREWLGRVGRVYDIIV

SEQ ID NO: 45 - DNA, 6733 bp, Homo sapiens
  CDS (575)..(4711)
gcgctgccgctgcggccggctcgaggcaccggagacagaatggctgccggggcgcccttgaccgccgggcgggcgaggcggggctgaccgccgcctccttgatcgcccccttccacgttgggcgcgcccacttcggggcgcccgctcggcccccgccctcctgggcgcgcggcgctcggagccgaggcagttggcgcgggccgcgggcgaggcggggccgcgcgcggggtcccctcctcctcccggtcaggtcccctcaggagcgccgggcgcagtctgcgcctcccgctccccgcctccggccgggtccgggacgccgcggctgtggggtcggcccgctaaggacaaggtcgggagactgggtggcgatgcccgagtgcgactggaggcagccgagcggaggcgacggcggttgggatctgtccctcctgaccggggagcgggactcggacgggcgccggtgaggaggaggagaagcggcggcggagaggttttctgcggccggaattcccttcaacagcatccctgtcggcgcccgcgagcgcagtctcgccgggcaggggcgccggggaagatggagactgggggccgggcccgcactggtaccccgcagccagcggccccgggggtgtggagggctcggccggcgggcggcggcggcgggggcgcctcctcctggctgctggacgggaacagctggctgctgtgctatggcttcctctacctggcgctctacgcgcaggtgtcccagtccaagccgtgcgagaggaccggctcctgcttctcgggccgctgtgtcaactccacctgcctctgcgacccgggctgggtgggggaccagtgccagcactgccagggcaggttcaagttaacagaaccttctggatatttaacagatggcccaattaactataaatataaaactaaatgtacttggctcattgaaggctatccaaatgcagtgttaagattaagattcaatcattttgctacagaatgtagctgggatcatatgtatgtttatgatggagattcaatatatgcacctttaatagctgtacttagtggtttgatagtccctgaaataaggggcaatgaaactgtgcctgaagttgttactacatctggctatgcactgttacatttttttagtgatgctgcgtataatctaactggtttcaacattttctattcaatcaattcttgtcctaacaattgctctggtcatgggaagtgtacaactagtgtctctgttccaagtcaagtatattgtgaatgtgataaatactggaagggtgaagcttgtgatattccttactgtaaagccaattgcggcagtccagatcacggttactgtgacctgactggagaaaaattatgtgtctgcaatgatagttggcaaggtcctgattgttctttgaatgttccctctactgagtcttactggattctgccaaacgttaaacccttcagtccttctgtaggtcgggcttcacataaagcagttttacacgggaaatttatgtgggtgattggtggatatacttttaactacagttcttttcaaatggtcctaaattacaatttagaaagcagtatatggaatgtaggaactccatcaaggggacctctccagagatatggacactctcttgctttatatcaggaaaacatctttatgtatggaggcagaattgaaacaaatgatggcaatgtcacagatgaattatgggtttttaacatacatagtcagtcatggagtacaaaaactcctactgttcttggacatggtcagcagtatgctgtggagggacattcagcacatattatggagttggatagtagagatgttgtcatgatcataatatttggatattctgcaatatatggttatacaagcagcatacaggaataccatatctcatcaaacacttggcttgttccagaaactaaaggagctattgtacaaggtggatatggccatactagtgtgtatgatgaaataacaaagtccatttatgttcatggagggtataaagcattgccagggaacaaatatggattggttgatgatctttataaatatgaagttaacactaagacttggactattttgaaagaaagtgggtttgccagataccttcattcagctgttcttatcaatggagctatgcttatttttggaggaaatacccataatgacacttccttgagtaacggtgcaaaatgtttttctgccgatttcctggcatatgacatagcttgtgatgaatggaaaatactaccaaaaccaaatcttcatagagatgtcaacagatttggacactctgcagtagtcattaacgggtccatgtatatatttgggggattttctagtgtactccttaatgatatccttgtatacaagcctccaaattgcaaggctttcagagatgaagaactttgtaaaaatgctggtccagggataaaatgtgtttggaataaaaatcactgtgaatcttgggaatctgggaatactaataatattcttagagcaaagtgccctcctaaaacagctgcttctgatgacagatgttacagatatgcagattgtgccagctgtactgccaatacaaatgggtgccaatggtgtgatgacaagaaatgcatttcggcaaatagtaactgcagtatgtctgtcaagaactacaccaaatgtcatgtgagaaatgagcagatttgtaacaaacttaccagctgtaaaagctgttcactaaacttgaattgccagtgggatcagagacagcaagaatgccaggctttaccagctcatctttgtggagaaggatggagtcatattggggatgcttgtcttagagtcaattccagtagagaaaactatgacaatgcaaaactttattgctataatcttagtggaaatcttgcttcattaacaacctcaaaagaagtagaatttgttctggatgaaatacagaagtatacacaacagaaagtatcaccttgggtaggcttgcgcaagatcaatatatcctattggggatgggaagacatgtctccttttacaaacacaacactacagtggcttcctggcgaacccaatgattctgggttttgtgcatatctggaaagggctgcagtggcaggcttaaaagctaatccttgtacatctatggcaaatggccttgtctgtgaaaaacctgttgttagtccaaatcaaaatgcgaggccgtgcaaaaagccatgctctctgaggacatcatgttccaactgtacaagcaatggcatggagtgtatgtggtgcagcagtacgaaacgatgtgttgactctaatgcctatatcatctcttttccatatggacaatgtctagagtggcaaactgccacctgctcccctctaaattgttctggattgagaacctgtggacagtgtttggaacagcctggatgtggctggtgcaatgatcctagtaatacaggaagaggacattgcattgaaggttcttcacggggaccaatgaagcttattggaatgcaccacaatgagatggttcttgacaccaatctttgccccaaagaaaagaactatgagtggtcctttatccagtgtccagcttgccagtgtaatggacatagcacttgcatcaataataatgtgtgcgaacagtgtaaaaatctcaccacaggaaagcagtgtcaagattgtatgccaggttattatggagatccaaccaatggtggacagtgcacagcttgtacatgcagtggccatgcaaatatctgtcatctgcacacaggaaaatgtttctgcacaactaaaggaataaaaggtgaccaatgccaattatgtgactctgaaaatcgctatgttggtaatccacttagaggaacatgttattacagccttttgattgattatcaatttaccttcagcttattacaggaagatgatcgccaccatactgccataaactttatagcaaacccagaacagtcgaacaaaaatctggatatatcaattaatgcatcaaacaactttaatctcaacatttcgtggtctgtcggttcaacagctggaacaatatctggggaagagacttctatagtttccaagaataatataaaggaatacagagatagtttttcctatgaaaaatttaactttagaagcaatcctaacattacattctatgtgtacgtcagcaacttttcctggcctattaaaatacagattgcattctcacaacacaatacaatcatggaccttgtgcagttttttgtcaccttcttcagttgtttcctatccttattgctggtggctgctgtggtatggaagatcaaacaaacttgttgggcttctcgacggagagagcaactgcttcgagaacgacagcagatggccagccgtccctttgcttctgttgatgtagctctggaagtgggagctgaacaaacagagtttctgcgagggccattagagggggcacccaagccaattgccattgaaccatgtgctgggaacagagctgctgttctgactgtgtttctttgtctaccacgaggatcatcaggtgcccctccccctgggcagtcaggccttgcaattgccagtgccctaatagatatttcacaacagaaagcttcagatagtaaagataagacttctggagtccggaatcgaaaacacctttcaacacgtcaaggaacttgtgtctgagaaatggaaaccgctcctgtatattctgtactgttttacttcgggcttctgttaaagctgttctatggccttggattttatggaggcagatctctgtatcatccagagcctgagtacagtttccttccaaatggacaatgacccaggtggccaaagaatgttcatgagttttataaaagtattgatggtcacaggtgataaagtcagtttttaccactatcttaggcttattatagctaacattaaattactctggaaaaagatgtatattgtttcttaatgaagatgaaaaatatgtaattcatataaatcaactgtttatatcccaagacttgaaagaaagacattttttaatgcctgaatgatgagaattgtacagtttttgcctcataagcaaacttgaatcacctgtgtatgaacagggaatgaacacattgcaatggctttaaatgctcttttatctcgttgtaaaggtaaggcaagattttgatgtagtaggatgtaggtaatgtatttaaatatttcatatgaccatatcgtgtccaaactcagtctgagaatgtgacagctttccgcctaactagaatgcagaccagaatgagttcaactcattctgtgcaacttcacagggggtttattagaatgctcagtgtagaggacattcctgtcatccatgccaactacctaactcgttatcagagctgatagagcatggaaaagtctgtccagcgatcagttgttcccctccttccaaaaacagcctccaataccacaacctgaaaagagccgaaatggttattttacagcatacaagcttctgctccagtatgataatttttaattgcctaagaatcactggatcagacctaaatgatccatctgcatttttataagaatggatctttctttgcccttcctctcctagctgctagattttaactaccttttacaaatgttacaaaatgtattttagaggcgacatctctcaagatgacctgagttccttcctgccaactgttccacctagaatacaagtagagaagagcactggctggcaagcatcaacaggagtcttcttcccaacacgagcgcatccatgtcctgagaaaaagtctgtggtttagaaaatatgtccatggttgcccacagtcagcacactcttagtgactcaaaattctgaattatggcagaaaggaaaaataaaacatacttcacattagaacacagaatcatttacatcctaatactgaccacagttcactaaagctcagtagcattaacagatatagtttggaattgcagtttcctcacttcagggtgacaagatatgtataacagtgacagaaatctccaaagctgctgtatatgatatagctttgttaaatatgaaggtcctttaaatacaattgatgtttagtactatatatgtacttttcacattctttggatttctggaaggttatgacactttactgtttacagctaatgcatagttacttgcatgccatggttgtacagtagcagactatgaccctattgtgatattaagtgtttatttcataatgccatttatacatagctgaatttgatgaggattgaatgtcatatataagaggaatgatcatacaatatgtagttgcatcttatataagatttctaggttgcatctaaccatgactatgtcattattttgataattaggcatttatgaattatagtatatattcctcatgttggcatgataattttgctattttccatgcattaaaaataagacaaattcttagagtaattttagtaattttatctataatctgtggggtttttttggagggggaggccactggttgtttctacttccctgtgatattttctctctcattaaaggaatgagctaagtttgtaaatatctcctaaaaacaatcaagtaattttattagcttcttttggaccctctaaatattgacttctctcatgaaaaaataaattgatgaaactaaaaaaaaaaaaaaaaaaaaa

SEQ ID NO: 46 - protein, 1379 aa, Homo sapiens
METGGRARTGTPQPAAPGVWRARPAGGGGGGASSWLLDGNSWLLCYGFLYLALYAQVSQSKPCERTGSCFSGRCVNSTCLCDPGWVGDQCQHCQGRFKLTEPSGYLTDGPINYKYKTKCTWLIEGYPNAVLRLRFNHFATECSWDHMYVYDGDSIYAPLIAVLSGLIVPEIRGNETVPEVVTTSGYALLHFFSDAAYNLTGFNIFYSINSCPNNCSGHGKCTTSVSVPSQVYCECDKYWKGEACDIPYCKANCGSPDHGYCDLTGEKLCVCNDSWQGPDCSLNVPSTESYWILPNVKPFSPSVGRASHKAVLHGKFMWVIGGYTFNYSSFQMVLNYNLESSIWNVGTPSRGPLQRYGHSLALYQENIFMYGGRIETNDGNVTDELWVFNIHSQSWSTKTPTVLGHGQQYAVEGHSAHIMELDSRDVVMIIIFGYSAIYGYTSSIQEYHISSNTWLVPETKGAIVQGGYGHTSVYDEITKSIYVHGGYKALPGNKYGLVDDLYKYEVNTKTWTILKESGFARYLHSAVLINGAMLIFGGNTHNDTSLSNGAKCFSADFLAYDIACDEWKILPKPNLHRDVNRFGHSAVVINGSMYIFGGFSSVLLNDILVYKPPNCKAFRDEELCKNAGPGIKCVWNKNHCESWESGNTNNILRAKCPPKTAASDDRCYRYADCASCTANTNGCQWCDDKKCISANSNCSMSVKNYTKCHVRNEQICNKLTSCKSCSLNLNCQWDQRQQECQALPAHLCGEGWSHIGDACLRVNSSRENYDNAKLYCYNLSGNLASLTTSKEVEFVLDEIQKYTQQKVSPWVGLRKINISYWGWEDMSPFTNTTLQWLPGEPNDSGFCAYLERAAVAGLKANPCTSMANGLVCEKPVVSPNQNARPCKKPCSLRTSCSNCTSNGMECMWCSSTKRCVDSNAYIISFPYGQCLEWQTATCSPLNCSGLRTCGQCLEQPGCGWCNDPSNTGRGHCIEGSSRGPMKLIGMHHNEMVLDTNLCPKEKNYEWSFIQCPACQCNGHSTCINNNVCEQCKNLTTGKQCQDCMPGYYGDPTNGGQCTACTCSGHANICHLHTGKCFCTTKGIKGDQCQLCDSENRYVGNPLRGTCYYSLLIDYQFTFSLLQEDDRHHTAINFIANPEQSNKNLDISINASNNFNLNISWSVGSTAGTISGEETSIVSKNNIKEYRDSFSYEKFNFRSNPNITFYVYVSNFSWPIKIQIAFSQHNTIMDLVQFFVTFFSCFLSLLLVAAVVWKIKQTCWASRRREQLLRERQQMASRPFASVDVALEVGAEQTEFLRGPLEGAPKPIAIEPCAGNRAAVLTVFLCLPRGSSGAPPPGQSGLAIASALIDISQQKASDSKDKTSGVRNRKHLSTRQGTCV

SEQ ID NO: 47 - DNA, 17589 bp, Homo sapiens
tctgtgccgggccctgcgatttgcagcctccaatccatgtggcaacattcagcgctcactctatgagggtttttgtttgggtttcttaacacagcttgacagggcatcacacccaatagttcagaagctcatctgtcaacacattgtccctggcaatgtcaagagtctgctgaagcagcctattccagagccaaaaggaggtcggcttatccaggttgaaggctactggattgcggtgggagacaaggagcctacaatagatgagacgtacattctgacatcttctgtgaagctgaacctgagagatatagtccgagttgtctctgcaggaacctatccagtgctgattcagggagagacatcagttggtaaaacaagcctgatccagtggctggctgcagctactggcaaccactgtgtgcgtattaataatcacgaacacacggatattcaggagtacattggttgttacacgtctgactcctcagggaagcttgtctttaaggaaggtagggttaagattccattccatggacataggtgtttattctttcacacacatttccttaagtaatattcttcatcctttccaattgaggcacatggacctttgctgtaacagccggcttttcttgatgcctgagctaagatagttaaggggtgatgcataaggtgctggctttctttaggttctgctaatcttgctggctgtatacaggactagggccaattttcaagaggggaattgaactgctgctttattttctaggaattcagagaatggggttagtgttagccaaaaggaagttgggaatagtcaacagaatgtggtgatttaaatgaaattagactgcaggggaaagattacacaagaaatatgaggtattttcagccttggcttcttttctgtggggaaaaaagggactattttaattgaaaattgttcctccttgatctgcagtgtcataatttgttttgaggcaagactagctacagaaagtaatttgctttgaaatttgatgataacctaggatttgttgatttgtacataatgcattttaaaactttgtactgatttatacactagttcttgctgtttgtttcttcctaggtgttcttattgatgccatgagaaaaggctattggattattttagatgaattaaatttggcccctactgatgtgttagaggcgctgaataggctgttggatgataaccgtgaattgctagtaacagaaacacaggaagttgttaaagcacaccctcggtttatgctttttgccacccaaaatcccccaggactttatggaggcagaaaggtcctttctagagccttcaggaatcggtttgtggaattgcactttgatgagttacctagctccgagttggaaacaatcttgcacaagcggtgtagtttgccaccctcctattgcagcaagttggttaaagtcatgctggatcttcagtcctatcgcagaagttcttcagtgtttgctggaaagcagggcttcatcacccttcgtgatctgttccgatgggctgaaagatacagattggctgagccgaccgagaaggagtatgactggctacagcatttagccaatgatggttatatgcttctggcaggtcgagtcaggaagcaggaggaaattgatgtgattcaagaagtccttgagaaacatttcaagaaaaaattgtgtcctcaatctcttttctccaaagaaaatgttctaaaattgctgggtaaattgtctactcagatatccacattggagtgtaactttggccacatcgtgtggactgagggcatgcggagactcgcgatgctagtgggaagggcattggaatttggtgaacctgtgctgctggttggagacactgggtgtgggaaaactactatctgtcaggtatttgcagccttggcaaatcagaaattatactctgtcagctgccacttacacatggagacatcagacttcctgggtggcctgcggccagtgagacaaaagccaaacgacaaggaagaaattgacacatcaagactctttgagtggcatgatgggcctctggttcaggccatgaaggaggacggctttttcctcttggatgagatctcattggccgatgactctgtcttggaaagactcaacagtgtccttgaagtagaaaagtctctggtattagctgaaaaaggcagtccagaggacaaggatagtgaaatagagctgttgactgctgggaaaaaatttcgtattctagcaaccatgaaccctgggggtgactttggaaaaaaggagctgtctcctgccttaagaaaccggtttacagaaatatggtgccctcaaagcacaagccgtgaagatttaattcagatcatcaatcataatcttcgtccaggattgtgtctgggcagaatagatcctaaagggtctgacatacctgaagtgatgctggatttcattgactggctgacccaccaagagtttggcagaaagtgtgtggtcagtatcagagatatcctgtcctgggttaacttcatgaacaaaatgggggaggaagctgctttgaaaaggccagagatcatctccactgtgacatcttttgtccatgctgcatgcctggtgtacatagatggaataggttcaggggtaacttcctctgggtttggtacagcccttttggcacgaaaagaatgtctgaaatttctaatcaagaggcttgccaagatagtacgacttacagaatatcagaaaaatgagttgaagatttatgacagaatgaaggccaaagaattcactggaatagataacctttggggaattcatccattttttataccaaggggtaagaatgatttttaaaaaatgaattttccttttctatagatcatagatacttggcttttattgtgacttagttttaatgtgtaatactcatgattatatttgcactaactgagttagattctgacttgagaataaccataattgtgtgaatggttgaaaatacctgactggcatgtaaaaatagagggaaatagagacttcaatctataaatagattgtcttatacagtgcttatttttttattagttggttcccacattaggaactttcctatagtaaagctctaaactctactaatgttgacaataaacttttaagtggcttgcaaagacctatttagcctataatgtatcttaactatacaacctcatcatcttttacagaaacaggttttgtgaacccttgaaggctggtaatgtgtcattcctgatccggtccctggcatctgacatttaggcctcacagtcataggcactcagaaaatttctgatggatgagtgaatgattaaatgggaaatgcagtagtctaggagatagtgggtttgtgttctaattctttctctctttctatctaactagattgtctctaccaagtatttaaatgaggcagttagattagctacttctaaggtgcttctactttttcaggatgttgtttctgtagcagagtcatctgtttcttgtccctccgccctctctatgttaatgattgatgaatgcctgaagtatatggagttgcagtggcaattactggggtttcagtggtgaacataaccagtccaggttccattgcccttgcccctgtcctcagagctccatctctccttagcagtattctctcttcatccctgatgggctgtataatctaaccatcaaatcccttctctaagccaccatcataggactcagtgctcctgtgtaggagatacatgctagtggcctagaactggggtggtccttgcttctgctaccaagggtgaggtaataaatgttttcctagcctcactcccttcaaactggtgtacaaaaaaaaaaaaaaaaaaaaaacgaaaacaaaacaaaaacttcttccaagagacagtggcacaaatgttaaatattacaagactgttattagtcctgcatatcagttaacttacaggttaaggacacagtgtgaattgttttggtggccaaaaacattggatgaagttgattatgtggaaccatgtggcccatatgcctagcttacacttggtttttaggaaagtaactatgaaggtaaattgtacaagtacatacagtgattcagggtgtaggttgtgaaaggacaggtgtgtgtttgcatgtacatgtatgtgtataggagatggagagatctgtgtagtaggcactgttgaagaaaacgtgttattggatattcctttaaagcattttatggatctaaaagtggggaaatattgaaatagggattgaacattttcactgcaaatggtatttcactaactgataacccatgtggtagatttttaaaatcttgagttgatgcatacatgtgatttgatgatgtcccgcttatacatgactttacttttctccacttaaggacctgtcctacacaggaataatattgcagactatgcactcagtgcagggaccactgctatgaatgcacagaggctcttaagagctaccaaactgaagaagcccattctcctggagggttcccctggtgttggcaagacaagtttggtgggagcattagcaaaggcttcaggaaatacccttgttagaatcaacttatcagagcaaacggacatcacagacctgtttggagcagatctacctgttgaaggtggcaagggaggagagtttgcctggcgtgatggccccttactggcagctttgaaggcaggccattgggtggtgttggatgagcttaacctggcttctcagtctgtattggaaggactcaatgcttgttttgaccaccgaggagaaatctatgtgcctgagttaggaatgagctttcaagtgcagcatgaaaagacgaagatttttgggtgtcagaatccctttagacaaggaggtgggaggaaaggcttgcccaggtctttccttaacagattcactcaggtcttcgttgatccccttacagtaattgacatggagttcattgccagtactttgtttccagccattgagaaaaatattgttaagaaaatggttgctttcaataaccaaattgatcatgaagtgactgttgagaagaaatgggggcaaaaaggaggaccctgggaattcaacctccgggaccttttccgctggtgtcagttgatgctggttgaccagtcccctgggtgttatgatcctggtcagcatgtgtttttggtctatggtgaaagaatgagaaccgaagaggacaaaaaaaaggtcattgctgtattcaaggatgtgtttggttcaaattccaacccatacatgggaaccagactatttcgtatcactccctatgatgttcagttgggctactcagtcctttcccgtgggagctgtgttcctcacccgtcccgccatcccctgttgctcctgcaccagtcattccaacccctggagtcaatcatgaagtgtgtgcagatgagctggatggtcatcctggtcgggccagcctctgtgggcaagaccagcctggtccagcttctggcacaccttactggccacacattaaagatcatggctatgaacagtgcaatggatactactgagctgctgggtggatttgagcaggttgatcttatacgaccttggaggaggctgctagagaaggtggagggaactgtaagggcactgttaagggatagcctccttatcagtgctgatgatgcagaagtagtgctgcgagcctggagtcattttcttctgacatataagcctaagtgtcttggagaaggtggtaaagctatcacgatggagattgtcaacaaactagaagcagtgttattgcttatgcagcgactcaacaataaaatcaactcatactgcaaggcagagtttgccaaacttgttgaagagttccgaagctttggtgtgaagcttacgcagttggccagtggccatagccatggcacatttgaatgggttgacagcatgttggttcaggccctgaagtctggagactggcttctgatggacaatgttaacttctgcaacccatcagtgttggatcgtttgaatgctttgcttgaacccggaggtgtcctcactattagtgagagaggaatgatagatggatccactcccacgataacaccaaatcccaatttcagacttttcctctcgatggatcctgttcatggagatatatcccgagctatgaggaatcgtggacttgaaatctacatttcaggggaaggggatgcaagcaccccagacaacctggatttgaaagttctgctgcacagccttggattggtggggaacagtgtatgtgacatcctcttggctttacacacagagacccggagcactgttgtaggttctccaacatcttctgtatcaactctaatccagacagccatactaattgtccagtacctgcagcgagggctgagtttagacagagccttttctgaagcatgctgggaagtatatgtctgttcccagcattcaccagcaaaccggaagcttgtacaggctttactggagaaacatgtttcttctttgcgagcacatgaaacctggggagactccattcttggcatgggactgtggccagattctgtgccctcagctctctttgctactgaagattcacacctgtctacagtccgaagagatggacagatcttagtatattgtctcaacaggatgagcatgaaaaccagcagctggacaaggagtcagccttttaccttgcaagacttagagaaaattatgcagtcccccagccctgagaacctgaaattcaatgcagtcgaagtgaatacttactggatcgatgaaccagatgttttggtcatggctgttaaattgctcatagaaagagcaaccaatcaggattggatgctcagagttaaatggctttatcatttagccaagaatataccgcaggggcttgagtccatacaaattcatttggaagccagtgctgcatctctcaggaatttttactcacattccctctcaggtgcagtcagtaatgttttcaaaatattacaaccaaatacaacagatgaatttgtgatccctctggatccccgatggaatatgcaggctctggacatgattagaaatttgatggactttgacccacaaacagaccagcctgaccagctctttgcccttttagaatcagctgcaaacaagacaatcatatatcttgaccgggaaaaacgggtttttactgaagcaaatttggtttctgttggtagcaaaaagctaagagagagtgttttgagaatgtcctttgaattccatcaagatccagaaagctatcacactctgccccatgaaattgtggtcaatcttgctgctttttttgaactttgtgatgcactagtcctgctctgggtacagtcctcccagggaatggtgtctgatgccagtgccaatgagatcttaggttctctgcggtggcgggaccggttctggactgtggccgacacagtaaaagtagatgccccaggtctggcccttcttgccctccattggcactgggttttaaaacatctggtccaccagatcccccgacttctgatgaattatgaagacaaatattacaaagaagttcagactgtctcagaacatattcagaattgtctggggagccagactggtggcttcgctggtataaagaagttgcagaagttcctgggacgaccgtttccttttaaggacaagctggtggtggagtgtttttcacaactgaaggtccttaacaaagtccttgccatcagggagcagatgtctgcccttggggagagtggatggcaggaagacattaaccgtctccaagtggttgcttctcagtggacattaaagaaaagtctcctgcaagcctggggactgatcctcagagcaaatattttggaagatgtcagcctagatgaattgaagaattttgtgcatgctcagtgtttagaactgaaagccaaaggactctcacttggttttctggagaaaaagcatgatgaagcttcctccctgtcccatccagacttgacctccgtaatccacctcaccaggagtgttcagttgtggcctgcaatggagtacctggctatgctttggcggtacaaagtgacagctgattttatggcacaagcttgtctcagaagatgcagcaaaaatcaacaaccccagataaatgaggagataagtcacctcatctcattttgtctttatcacacacctgttacacctcaagagcttcgagatctgtggtccttgctgcatcatcagaaggtgtctcctgaagaaattacatctttgtggtccgagttatttaattccatgtttatgtctttctggagcagtactgtgaccacaaatccagagtactggctaatgtggaaccctttgcctggtatgcagcagagggaggcacccaagtctgttttggactccacattgaagggccccggcaatctcaatagacccatattctctaagtgctgctttgaagtcttaaccagcagctggagagcaagtccctgggatgtgagtggcctccccattctttcctcctctcacgtgaccctaggagagtgggttgagagaactcagcagctccaggacatcagttcgatgctttggactaacatggctatctcttcagtagcagaattcagacgcacggattcccaactccaggggcaggtgctgttccggcacctggcaggcctagcagagctgctcccagagtcccggcggcaggagtacatgcagaactgtgagcagctgctgcttgggagcagccaggccttccagcatgtgggccagacacttggggacatggctggtcaggaggtgctgcccaaggaactgctctgccagttgctcacctccctgcaccactttgttggtgaaggggagagtaagaggagcctgcctgagccagcccagcgtgggagcctctgggtgagcctcggcttgctccagattcagacatggcttccccaggcacgctttgaccctgcggtgaagagggagtacaagctcaattacgtcaaggaagagttacaccaactgcagtgtgaatggaagacccggaacctgtcatcccagctgcagactggaagagacctggaagatgaagtcgttgtcagctactctcatcctcacgtcaggctgcttcgccaaaggatggatcggctggataatttaacctgtcacctgttgaagaaacaggcctttagaccccagctgcctgcctacgagtccctggttcaggagatccaccactacgtcaccagcatcgccaaggcccctgctgttcaggatctgctcacacggcttctgcaggccctccacatagatgggccacggtctgcccaagtagcccagagccttctaaaggaggaggcctcttggcagcagtcacaccaccagttccggaagcggctgtcagaggagtacaccttctatccagatgccgtgagcccactgcaggcatccatattgcagttacaacatggcatgaggctggtggcctctgagctccacacctcactctacagcagtatggttggtgcagacaggctggggaccctggccacagccttgctggctttcccatcggtgggccccaccttcccgacttactatgctcatgcagacactttgtgctcggtgaagtctgaggaggttctacgaggccttgggaagctaatcctcaagcgctcaggaggaaaggagctggaaggcaagggccagaaagcctgtcccactcgggagcagctgctgatgaatgctctcctttacctgcgctcccacgtgttatgcaagggagagttggaccagagggccctgcagctcttcagacatgtgtgtcaggaaatcatcagtgagtgggatgagcaggaacgcatagcccaagagaaggctgagcaggaaagcggcctgtatagatacaggagcaggaactctaggacagccctgagtgaagaggaggaggaagaacgggagttcagaaaacagttccccctgcatgaaaaggactttgcagatattttggtgcagccaacgttggaggagaacaaaggaacttcagatgggcaagaagaggaagcaggcacaaacccagctctcctctcccagaattcaatgcaggcagtaatgctgatacaccagcaattgtgtctcaactttgctcgatccctctggtatcaacagactctgccgccacatgaagcaaagcattacctcagcctgtttctgtcttgctatcagactggggcatcgcttgtgacacacttctaccccctgatgggagttgaactgaatgaccgactcttgggcagccaacttttggcctgtaccctctcccataacactctttttggggaggcaccctcagacctgatggtgaaacctgatgggccctatgacttctaccagcatcccaatgttccagaagcacggcagtgtcaacctgtgcttcaaggtttctcagaggctgtcagtcacttgctacaggactggccagaacacccagcgcttgaacagctcctggttgtaatggacagaattcgtagtttcccactttccagtcccatctcaaagttcctgaatggcttagagatccttctggcaaaggcacaggattgggaggaaaatgcaagtcgagctttgtctttgcggaaacatcttgatttgatcagtcagatgatcattcggtggcgtaaactggagctgaactgctggtccatgagtttggataatactatgaagcgccacaccgagaaatccaccaagcactggttctccatctatcagatgcttgagaagcacatgcaggaacaaacagaagaacaggaagatgacaaacagatgaccttgatgttgctggtcagcacattacaagcatttattgaaggatcctcgctgggagagttccatgtgcgacttcagatgttactggttttccattgtcatgtcttgctgatgccacaggttgaaggaaaggattcactttgcagtgttctatggaatttgtaccattattacaagcaattctttgaccgggtccaggccaaaattgtggaacttcgttcccccctagaaaaagaacttaaagaatttgttaagatttccaagtggaatgatgtcagcttctggtccattaagcaatctgtagaaaagacacacaggacactctttaaattcatgaagaaatttgaagcagtcctgagtgaaccctgccggtcatccctggtggagagtgacaaggaagaacagcctgactttttgcccaggccaacagatggagctgcaagtgaactgtcttccattcagaatctgaacagggcactgagggagaccctgttagcccaaccagcagctgggcaggccacaattccagagtggtgtcagggcgctgctccttccggcttggaaggggagcttctgcgtcgcttgccaaagctcaggaaacgcatgaggaagatgtgcctgacgttcatgaaggagagccccctgcctcgccttgtggagggccttgatcagttcacaggtgaagtgatttcctctgtgagtgagctgcagagcttaaaggtggaaccctctgcagagaaggagaagcagcggtcagaagccaagcacattctcatgcaaaaacagcgagctttgtcagacctctttaaacaccttgcaaaaattggtttgtcgtatcgcaaaggtcttgcttgggcccgttcaaaaaaccctcaagagatgcttcatcttcacccattagatctccagagcgcattgtccatcgtcagcagcactcaggaggctgattctaggctgcttacagaaatctcgtcttcatgggatggatgccagaagtatttttatcgctctcttgcacggcatgccaggcttaacgcagcactagcaactcctgccaaggaaatgggcatgggcaacgtggagaggtgcagagggttctcagcacatttgatgaagatgctcgtccgacagcggcgctccctgaccacgctcagtgagcagtggatcatcctcaggaacctcctcagctgtgtgcaagagattcacagcaggctgatggggccccaggcctaccccgtggccttcccccctcaggatggcgtgcagcagtggacagagcgcctgcagcacctggccatgcagtgccagatcctgcttgagcagctctcctggctcctccagtgctgccccagtgtagggccagctccaggccatggcaatgtccaggtactggggcagcctcctggcccctgcctggaaggaccagaacttagcaagggacaactttgtggagtagtgctggacctaattccttccaatctgagctacccatctccaatacctggaagtcagctgccctctggttgccggatgcggaaacaggatcacctttggcaacagtcaactacgagattaacagagatgctaaaaaccattaaaacagtgaaagctgacgtcgacaaaattagacagcagtcttgtgagactctctttcattcttggaaagattttgaagtttgctcttctgcgctgagttgcttgtcccaggtgtcagttcatttgcagggcctagagtccttgttcattcttccagggatggaggttgagcaaagagactcacaaatggcactagttgaaagtctggaatatgtaagaggagaaattagtaaagccatggctgactttactacctggaagacccatctgcttacttcagatagccaaggaggaaatcaaatgttggacgaaggatttgtggaagatttttcagagcaaatggaaattgccatccgagccatcctctgtgccatccagaacttagaagaaagaaagaatgaaaaagcagaggagaacactgaccaagcaagcccacaagaagattatgcaggctttgagagactgcaatcaggacatctaacaaaactcttagaggatgacttctgggccgatgtgagcactttgcacgtgcagaaaataatttctgccatctccgagctgttggagaggctgaaatcgtacggtgaggatggcacagcagcaaagcacctgttcttcagccaatcctgttccttgctggtgcgcctggtgccggtcctctccagctactcagacctcgtcctcttcttcctgaccatgtctttagcaactcaccgtagtactgcaaagctgctctctgtgcttgcccaggtctttacagagcttgcccagaagggattttgcttgcccaaagaatttatggaagattcagctggagagggagcaactgagttccatgactatgagggaggtggaattggagaaggcgagggcatgaaggatgtgagtgaccagatcggaaatgaagaacaggtggaagatacatttcagaagggtcaagaaaaagacaaagaggatcctgattcaaaatctgatattaagggcgaggataatgccattgagatgtcggaagattttgatgggaaaatgcatgatggggagcttgaagaacaagaagaggatgatgagaaatcagatagtgagggcggagacctggataaacacatgggcgatctcaatggtgaggaagctgacaaactagatgagaggctttggggtgatgatgatgaggaggaagatgaggaggaagaagacaataaaactgaagaaacaggaccaggaatggatgaggaagattctgaacttgttgctaaagatgacaacttggatagtggcaattcaaacaaagataaaagccagcaagataagaaggaagaaaaggaagaagcagaagctgatgatggtggacaaggtgaagacaaaattaatgaacaaatagatgagagggactatgatgaaaatgaggtggacccttaccatggcaatcaggaaaaggtgccagaacccgaggctttggaccttccagatgacttgaacctcgacagtgaagacaagaatggtggtgaggacaccgacaatgaagaaggagaagaagagaatcctttggagataaaagaaaaaccagaagaagcaggtcatgaagctgaggaaagaggagagaccgagaccgaccagaacgaaagtcagagtccacaggagcctgaggaaggccccagtgaagatgacaaggcagaaggggaagaggaaatggacacaggagctgatgaccaagatggagatgctgctcagcatcctgaagaacactctgaggagcagcagcagtctgtggaggaaaaagacaaggaagccgatgaagaaggtggagagaatggccctgctgaccaaggtttccagccccaggaggaagaagaacgggaggactctgatacagaggagcaggtgccagaggctttggagaggaaggagcatgcctcctgtgggcagactggtgtggagaacatgcagaacacacaggccatggagctggctggggccgcacctgagaaggagcaggggaaagaggaacacggaagtggagctgcagatgcaaaccaggcagaaggccatgaatcgaatttcattgcccagttggcctcccagaagcacaccaggaaaaacacacagagttttaagaggaaacctgggcaggctgacaatgaacgttccatgggtgatcacaatgagcgtgtgcacaagaggctgaggactgtggatacggacagccatgccgagcaggggccagctcagcagccccaggcccaggtggaggatgcagatgcattcgagcacattaaacaaggcagtgacgcatacgatgcacagacctatgatgtggccagcaaagaacagcaacagtctgcaaaagactctggcaaagatcaggaagaggaggagatagaggacacccttatggacacagaggagcaggaggagttcaaagcagcagacgtggagcagctgaagccagaggaaatcaagtcgggcaccacagcacccttgggctttgatgagatggaagtggagatccaaactgttaaaacagaggaagaccaagaccccagaacagacaaagcccataaggagacagaaaatgagaaaccagaaagaagccgagagtctaccattcatacagctcatcaattcctcatggacacgatcttccagccctttttaaaagatgtcaatgagctaagacaggagctggagagacagctggaaatgtggcagccacgtgaatctggaaacccagaggaggagaaggttgcagctgagatgtggcagagttacctgatcttaacagcgcctctttcacaacggttatgtgaagagcttcgtctcatattagagcctacccaggcagccaagctgaaaggagactatcgaactgggaaacgactaaacatacggaaagtcattccatacattgctagtcaatttcggaaagacaagatttggcttcgaaggaccaagcccagtaaacgccagtatcagatttgtttggctatcgatgactcttctagtatggtagacaatcataccaagcagcttgcatttgaatctttggctgtgattggaaatgctctaaccctcctggaagtgggtcagattgcagtgtgtagttttggagaatctgtaaagctgttacacccatttcatgagcagttcagtgattactctgggtcccagattctacgtctctgcaaattccaacaaaagaaaaccaagattgctcagtttctagagtctgttgccaacatgtttgcagctgctcagcagctctcgcagaacatcagttcagaaactgcacaactcctcctggtagtctctgatgggcgaggccttttccttgagggcaaagaaagagtcctggcagcagttcaggctgcccggaatgcaaatatctttgtcatctttgttgtattggacaatcccagttcacgggattctatcttggacattaaagtaccgatatttaaaggacctggagagatgcctgaaatccgatcctacatggaagagttcccattcccatactatatcattcttcgagatgtaaacgcacttcctgagacactcagcgatgccctcagacagtggtttgagttggtgacagcctctgaccacccatagaacagaaagaagagtccaaagtgagacttaactgtggtcagaaggtcacattgcttacccaggtgctcccttttggacaactacaaaaaattttattgtaatatttttattttacaacgtgatcttacagcctacagaatgctctctggctcccggctttgcctgggctgaggtttttataccaaacctggaagcagcagcaggtgcctgaactcgtaactagagaagagttatccttcttccctgccttggaagccctggcctgggaggaggtcataccccaccgttggagcccagctgcctgttttcttttgcaggggatctgggcacctgtgccttgaggagatgctgccaggagcatgggactctgacagtcctttgtataaaggactaaagggagctgcccttttgaccctgttctaagctctgccttgccaagcccatagtgtgtgcccaaaagctgtcaagtggccaagacagctcgtttctggagagtatgagggtgtgttttcttattgtgaaaggaactaccttctcttagagggtaggaagaatgtggtgtgtgtgtgttctcataaagcaactggacattataggtgcccaggtcatctataaaaacgatccttgggctgtgtaaaaatgaagtggcttttcagtatcctctttcacacttgctgcttcgggagactatgcaatgatgggaaggtgattgcccctttatttcattcagtgccatggtccctgttgttgtagtaatttatttgtttagttcatttttttttttcttaacagtcaaggggaagagtgattcctcacactgctttcaagctggactgagccagtctcattctgggaaagaaacgctgtgtccagaactcagcagctccatctattttttccagtcgaaagaaactgatctttaggcagtttttacttggccagaaagcagtgctgaatacttgaaactgtgtgctctgttctacttaatgttctgtcagaatgttcttttgtaggcagtatgtcatgatgtaatcatctatctccttgtctgtttccaagttacactgtgaagtctgcgacccttttgaggtggtcatcaaagacacagattccttgtttaaccaagtgtcccaaagcatgtacctgaagttatatcattttttattctaaaaagctatgcagcttatattctgaaaactattaaaacatataccactgttgttgatgtaatttgtgactcttcttaatggaagatgacaggattgtaaaaggtatgctaggggactgatcttctctgctggatcagtcagtcagctgttactagttgatgctgtgctaacatgatcccctcctacttccatgttgctcttactacaaaggttatcatttgcatttatgtccatggtaggctgagctataatatgctggctttgcagcagaatgaaaaggatgagttggtgtagccttataaggaggcttataaaaattaattatcctccataaatg

SEQ ID NO: 48 - DNA, 3890 bp, Homo sapiens
  CDS (1129)..(2862)
tctgtgccgggccctgcgatttgcagcctccaatccatgtggcaacattcagcgctcactctatgagggtttttgtttgggtttcttaacacagcttgacagggcatcacacccaatagttcagaagctcatctgtcaacacattgtccctggcaatgtcaagagtctgctgaagcagcctattccagagccaaaaggaggtcggcttatccaggttgaaggctactggattgcggtgggagacaaggagcctacaatagatgagacgtacattctgacatcttctgtgaagctgaacctgagagatatagtccgagttgtctctgcaggaacctatccagtgctgattcagggagagacatcagttggtaaaacaagcctgatccagtggctggctgcagctactggcaaccactgtgtgcgtattaataatcacgaacacacggatattcaggagtacattggttgttacacgtctgactcctcagggaagcttgtctttaaggaaggtagggttaagattccattccatggacataggtgtttattctttcacacacatttccttaagtaatattcttcatcctttccaattgaggcacatggacctttgctgtaacagccggcttttcttgatgcctgagctaagatagttaaggggtgatgcataaggtgctggctttctttaggttctgctaatcttgctggctgtatacaggactagggccaattttcaagaggggaattgaactgctgctttattttctaggaattcagagaatggggttagtgttagccaaaaggaagttgggaatagtcaacagaatgtggtgatttaaatgaaattagactgcaggggaaagattacacaagaaatatgaggtattttcagccttggcttcttttctgtggggaaaaaagggactattttaattgaaaattgttcctccttgatctgcagtgtcataatttgttttgaggcaagactagctacagaaagtaatttgctttgaaatttgatgataacctaggatttgttgatttgtacataatgcattttaaaactttgtactgatttatacactagttcttgctgtttgtttcttcctaggtgttcttattgatgccatgagaaaaggctattggattattttagatgaattaaatttggcccctactgatgtgttagaggcgctgaataggctgttggatgataaccgtgaattgctagtaacagaaacacaggaagttgttaaagcacaccctcggtttatgctttttgccacccaaaatcccccaggactttatggaggcagaaaggtcctttctagagccttcaggaatcggtttgtggaattgcactttgatgagttacctagctccgagttggaaacaatcttgcacaagcggtgtagtttgccaccctcctattgcagcaagttggttaaagtcatgctggatcttcagtcctatcgcagaagttcttcagtgtttgctggaaagcagggcttcatcacccttcgtgatctgttccgatgggctgaaagatacagattggctgagccgaccgagaaggagtatgactggctacagcatttagccaatgatggttatatgcttctggcaggtcgagtcaggaagcaggaggaaattgatgtgattcaagaagtccttgagaaacatttcaagaaaaaattgtgtcctcaatctcttttctccaaagaaaatgttctaaaattgctgggtaaattgtctactcagatatccacattggagtgtaactttggccacatcgtgtggactgagggcatgcggagactcgcgatgctagtgggaagggcattggaatttggtgaacctgtgctgctggttggagacactgggtgtgggaaaactactatctgtcaggtatttgcagccttggcaaatcagaaattatactctgtcagctgccacttacacatggagacatcagacttcctgggtggcctgcggccagtgagacaaaagccaaacgacaaggaagaaattgacacatcaagactctttgagtggcatgatgggcctctggttcaggccatgaaggaggacggctttttcctcttggatgagatctcattggccgatgactctgtcttggaaagactcaacagtgtccttgaagtagaaaagtctctggtattagctgaaaaaggcagtccagaggacaaggatagtgaaatagagctgttgactgctgggaaaaaatttcgtattctagcaaccatgaaccctgggggtgactttggaaaaaaggagctgtctcctgccttaagaaaccggtttacagaaatatggtgccctcaaagcacaagccgtgaagatttaattcagatcatcaatcataatcttcgtccaggattgtgtctgggcagaatagatcctaaagggtctgacatacctgaagtgatgctggatttcattgactggctgacccaccaagagtttggcagaaagtgtgtggtcagtatcagagatatcctgtcctgggttaacttcatgaacaaaatgggggaggaagctgctttgaaaaggccagagatcatctccactgtgacatcttttgtccatgctgcatgcctggtgtacatagatggaataggttcaggggtaacttcctctgggtttggtacagcccttttggcacgaaaagaatgtctgaaatttctaatcaagaggcttgccaagatagtacgacttacagaatatcagaaaaatgagttgaagatttatgacagaatgaaggccaaagaattcactggaatagataacctttggggaattcatccattttttataccaaggggtaagaatgatttttaaaaaatgaattttccttttctatagatcatagatacttggcttttattgtgacttagttttaatgtgtaatactcatgattatatttgcactaactgagttagattctgacttgagaataaccataattgtgtgaatggttgaaaatacctgactggcatgtaaaaatagagggaaatagagacttcaatctataaatagattgtcttatacagtgcttatttttttattagttggttcccacattaggaactttcctatagtaaagctctaaactctactaatgttgacaataaacttttaagtggcttgcaaagacctatttagcctataatgtatcttaactatacaacctcatcatcttttacagaaacaggttttgtgaacccttgaaggctggtaatgtgtcattcctgatccggtccctggcatctgacatttaggcctcacagtcataggcactcagaaaatttctgatggatgagtgaatgattaaatgggaaatgcagtagtctaggagatagtgggtttgtgttctaattctttctctctttctatctaactagattgtctctaccaagtatttaaatgaggcagttagattagctacttctaaggtgcttctactttttcaggatgttgtttctgtagcagagtcatctgtttcttgtccctccgccctctctatgttaatgattgatgaatgcctgaagtatatggagttgcagtggcaattactggggtttcagtggtgaacataaccagtccaggttccattgcccttgcccctgtcctcagagctccatctctccttagcagtattctctcttcatccctgatgggctgtataatctaaccatcaaatcccttctctaagccaccatcataggactcagtgctcctgtgtaggagatacatgctagtggcctagaactggggtggtccttgcttctgctaccaagggtgaggtaataaatgttttcctagcctcactcccttcaaactggtgtacaaaaaaaaaaaaaaaaaa

SEQ ID NO: 49 - protein, 577 aa, Homo sapiens
MRKGYWIILDELNLAPTDVLEALNRLLDDNRELLVTETQEVVKAHPRFMLFATQNPPGLYGGRKVLSRAFRNRFVELHFDELPSSELETILHKRCSLPPSYCSKLVKVMLDLQSYRRSSSVFAGKQGFITLRDLFRWAERYRLAEPTEKEYDWLQHLANDGYMLLAGRVRKQEEIDVIQEVLEKHFKKKLCPQSLFSKENVLKLLGKLSTQISTLECNFGHIVWTEGMRRLAMLVGRALEFGEPVLLVGDTGCGKTTICQVFAALANQKLYSVSCHLHMETSDFLGGLRPVRQKPNDKEEIDTSRLFEWHDGPLVQAMKEDGFFLLDEISLADDSVLERLNSVLEVEKSLVLAEKGSPEDKDSEIELLTAGKKFRILATMNPGGDFGKKELSPALRNRFTEIWCPQSTSREDLIQIINHNLRPGLCLGRIDPKGSDIPEVMLDFIDWLTHQEFGRKCVVSIRDILSWVNFMNKMGEEAALKRPEIISTVTSFVHAACLVYIDGIGSGVTSSGFGTALLARKECLKFLIKRLAKIVRLTEYQKNELKIYDRMKAKEFTGIDNLWGIHPFFIPRGKNDF

SEQ ID NO: 50 - DNA, 14101 bp, Homo sapiens
  CDS (1039)..(12630)
gcagttagattagctacttctaaggtgcttctactttttcaggatgttgtttctgtagcagagtcatctgtttcttgtccctccgccctctctatgttaatgattgatgaatgcctgaagtatatggagttgcagtggcaattactggggtttcagtggtgaacataaccagtccaggttccattgcccttgcccctgtcctcagagctccatctctccttagcagtattctctcttcatccctgatgggctgtataatctaaccatcaaatcccttctctaagccaccatcataggactcagtgctcctgtgtaggagatacatgctagtggcctagaactggggtggtccttgcttctgctaccaagggtgaggtaataaatgttttcctagcctcactcccttcaaactggtgtacaaaaaaaaaaaaaaaaaaaaaacgaaaacaaaacaaaaacttcttccaagagacagtggcacaaatgttaaatattacaagactgttattagtcctgcatatcagttaacttacaggttaaggacacagtgtgaattgttttggtggccaaaaacattggatgaagttgattatgtggaaccatgtggcccatatgcctagcttacacttggtttttaggaaagtaactatgaaggtaaattgtacaagtacatacagtgattcagggtgtaggttgtgaaaggacaggtgtgtgtttgcatgtacatgtatgtgtataggagatggagagatctgtgtagtaggcactgttgaagaaaacgtgttattggatattcctttaaagcattttatggatctaaaagtggggaaatattgaaatagggattgaacattttcactgcaaatggtatttcactaactgataacccatgtggtagatttttaaaatcttgagttgatgcatacatgtgatttgatgatgtcccgcttatacatgactttacttttctccacttaaggacctgtcctacacaggaataatattgcagactatgcactcagtgcagggaccactgctatgaatgcacagaggctcttaagagctaccaaactgaagaagcccattctcctggagggttcccctggtgttggcaagacaagtttggtgggagcattagcaaaggcttcaggaaatacccttgttagaatcaacttatcagagcaaacggacatcacagacctgtttggagcagatctacctgttgaaggtggcaagggaggagagtttgcctggcgtgatggccccttactggcagctttgaaggcaggccattgggtggtgttggatgagcttaacctggcttctcagtctgtattggaaggactcaatgcttgttttgaccaccgaggagaaatctatgtgcctgagttaggaatgagctttcaagtgcagcatgaaaagacgaagatttttgggtgtcagaatccctttagacaaggaggtgggaggaaaggcttgcccaggtctttccttaacagattcactcaggtcttcgttgatccccttacagtaattgacatggagttcattgccagtactttgtttccagccattgagaaaaatattgttaagaaaatggttgctttcaataaccaaattgatcatgaagtgactgttgagaagaaatgggggcaaaaaggaggaccctgggaattcaacctccgggaccttttccgctggtgtcagttgatgctggttgaccagtcccctgggtgttatgatcctggtcagcatgtgtttttggtctatggtgaaagaatgagaaccgaagaggacaaaaaaaaggtcattgctgtattcaaggatgtgtttggttcaaattccaacccatacatgggaaccagactatttcgtatcactccctatgatgttcagttgggctactcagtcctttcccgtgggagctgtgttcctcacccgtcccgccatcccctgttgctcctgcaccagtcattccaacccctggagtcaatcatgaagtgtgtgcagatgagctggatggtcatcctggtcgggccagcctctgtgggcaagaccagcctggtccagcttctggcacaccttactggccacacattaaagatcatggctatgaacagtgcaatggatactactgagctgctgggtggatttgagcaggttgatcttatacgaccttggaggaggctgctagagaaggtggagggaactgtaagggcactgttaagggatagcctccttatcagtgctgatgatgcagaagtagtgctgcgagcctggagtcattttcttctgacatataagcctaagtgtcttggagaaggtggtaaagctatcacgatggagattgtcaacaaactagaagcagtgttattgcttatgcagcgactcaacaataaaatcaactcatactgcaaggcagagtttgccaaacttgttgaagagttccgaagctttggtgtgaagcttacgcagttggccagtggccatagccatggcacatttgaatgggttgacagcatgttggttcaggccctgaagtctggagactggcttctgatggacaatgttaacttctgcaacccatcagtgttggatcgtttgaatgctttgcttgaacccggaggtgtcctcactattagtgagagaggaatgatagatggatccactcccacgataacaccaaatcccaatttcagacttttcctctcgatggatcctgttcatggagatatatcccgagctatgaggaatcgtggacttgaaatctacatttcaggggaaggggatgcaagcaccccagacaacctggatttgaaagttctgctgcacagccttggattggtggggaacagtgtatgtgacatcctcttggctttacacacagagacccggagcactgttgtaggttctccaacatcttctgtatcaactctaatccagacagccatactaattgtccagtacctgcagcgagggctgagtttagacagagccttttctgaagcatgctgggaagtatatgtctgttcccagcattcaccagcaaaccggaagcttgtacaggctttactggagaaacatgtttcttctttgcgagcacatgaaacctggggagactccattcttggcatgggactgtggccagattctgtgccctcagctctctttgctactgaagattcacacctgtctacagtccgaagagatggacagatcttagtatattgtctcaacaggatgagcatgaaaaccagcagctggacaaggagtcagccttttaccttgcaagacttagagaaaattatgcagtcccccagccctgagaacctgaaattcaatgcagtcgaagtgaatacttactggatcgatgaaccagatgttttggtcatggctgttaaattgctcatagaaagagcaaccaatcaggattggatgctcagagttaaatggctttatcatttagccaagaatataccgcaggggcttgagtccatacaaattcatttggaagccagtgctgcatctctcaggaatttttactcacattccctctcaggtgcagtcagtaatgttttcaaaatattacaaccaaatacaacagatgaatttgtgatccctctggatccccgatggaatatgcaggctctggacatgattagaaatttgatggactttgacccacaaacagaccagcctgaccagctctttgcccttttagaatcagctgcaaacaagacaatcatatatcttgaccgggaaaaacgggtttttactgaagcaaatttggtttctgttggtagcaaaaagctaagagagagtgttttgagaatgtcctttgaattccatcaagatccagaaagctatcacactctgccccatgaaattgtggtcaatcttgctgctttttttgaactttgtgatgcactagtcctgctctgggtacagtcctcccagggaatggtgtctgatgccagtgccaatgagatcttaggttctctgcggtggcgggaccggttctggactgtggccgacacagtaaaagtagatgccccaggtctggcccttcttgccctccattggcactgggttttaaaacatctggtccaccagatcccccgacttctgatgaattatgaagacaaatattacaaagaagttcagactgtctcagaacatattcagaattgtctggggagccagactggtggcttcgctggtataaagaagttgcagaagttcctgggacgaccgtttccttttaaggacaagctggtggtggagtgtttttcacaactgaaggtccttaacaaagtccttgccatcagggagcagatgtctgcccttggggagagtggatggcaggaagacattaaccgtctccaagtggttgcttctcagtggacattaaagaaaagtctcctgcaagcctggggactgatcctcagagcaaatattttggaagatgtcagcctagatgaattgaagaattttgtgcatgctcagtgtttagaactgaaagccaaaggactctcacttggttttctggagaaaaagcatgatgaagcttcctccctgtcccatccagacttgacctccgtaatccacctcaccaggagtgttcagttgtggcctgcaatggagtacctggctatgctttggcggtacaaagtgacagctgattttatggcacaagcttgtctcagaagatgcagcaaaaatcaacaaccccagataaatgaggagataagtcacctcatctcattttgtctttatcacacacctgttacacctcaagagcttcgagatctgtggtccttgctgcatcatcagaaggtgtctcctgaagaaattacatctttgtggtccgagttatttaattccatgtttatgtctttctggagcagtactgtgaccacaaatccagagtactggctaatgtggaaccctttgcctggtatgcagcagagggaggcacccaagtctgttttggactccacattgaagggccccggcaatctcaatagacccatattctctaagtgctgctttgaagtcttaaccagcagctggagagcaagtccctgggatgtgagtggcctccccattctttcctcctctcacgtgaccctaggagagtgggttgagagaactcagcagctccaggacatcagttcgatgctttggactaacatggctatctcttcagtagcagaattcagacgcacggattcccaactccaggggcaggtgctgttccggcacctggcaggcctagcagagctgctcccagagtcccggcggcaggagtacatgcagaactgtgagcagctgctgcttgggagcagccaggccttccagcatgtgggccagacacttggggacatggctggtcaggaggtgctgcccaaggaactgctctgccagttgctcacctccctgcaccactttgttggtgaaggggagagtaagaggagcctgcctgagccagcccagcgtgggagcctctgggtgagcctcggcttgctccagattcagacatggcttccccaggcacgctttgaccctgcggtgaagagggagtacaagctcaattacgtcaaggaagagttacaccaactgcagtgtgaatggaagacccggaacctgtcatcccagctgcagactggaagagacctggaagatgaagtcgttgtcagctactctcatcctcacgtcaggctgcttcgccaaaggatggatcggctggataatttaacctgtcacctgttgaagaaacaggcctttagaccccagctgcctgcctacgagtccctggttcaggagatccaccactacgtcaccagcatcgccaaggcccctgctgttcaggatctgctcacacggcttctgcaggccctccacatagatgggccacggtctgcccaagtagcccagagccttctaaaggaggaggcctcttggcagcagtcacaccaccagttccggaagcggctgtcagaggagtacaccttctatccagatgccgtgagcccactgcaggcatccatattgcagttacaacatggcatgaggctggtggcctctgagctccacacctcactctacagcagtatggttggtgcagacaggctggggaccctggccacagccttgctggctttcccatcggtgggccccaccttcccgacttactatgctcatgcagacactttgtgctcggtgaagtctgaggaggttctacgaggccttgggaagctaatcctcaagcgctcaggaggaaaggagctggaaggcaagggccagaaagcctgtcccactcgggagcagctgctgatgaatgctctcctttacctgcgctcccacgtgttatgcaagggagagttggaccagagggccctgcagctcttcagacatgtgtgtcaggaaatcatcagtgagtgggatgagcaggaacgcatagcccaagagaaggctgagcaggaaagcggcctgtatagatacaggagcaggaactctaggacagccctgagtgaagaggaggaggaagaacgggagttcagaaaacagttccccctgcatgaaaaggactttgcagatattttggtgcagccaacgttggaggagaacaaaggaacttcagatgggcaagaagaggaagcaggcacaaacccagctctcctctcccagaattcaatgcaggcagtaatgctgatacaccagcaattgtgtctcaactttgctcgatccctctggtatcaacagactctgccgccacatgaagcaaagcattacctcagcctgtttctgtcttgctatcagactggggcatcgcttgtgacacacttctaccccctgatgggagttgaactgaatgaccgactcttgggcagccaacttttggcctgtaccctctcccataacactctttttggggaggcaccctcagacctgatggtgaaacctgatgggccctatgacttctaccagcatcccaatgttccagaagcacggcagtgtcaacctgtgcttcaaggtttctcagaggctgtcagtcacttgctacaggactggccagaacacccagcgcttgaacagctcctggttgtaatggacagaattcgtagtttcccactttccagtcccatctcaaagttcctgaatggcttagagatccttctggcaaaggcacaggattgggaggaaaatgcaagtcgagctttgtctttgcggaaacatcttgatttgatcagtcagatgatcattcggtggcgtaaactggagctgaactgctggtccatgagtttggataatactatgaagcgccacaccgagaaatccaccaagcactggttctccatctatcagatgcttgagaagcacatgcaggaacaaacagaagaacaggaagatgacaaacagatgaccttgatgttgctggtcagcacattacaagcatttattgaaggatcctcgctgggagagttccatgtgcgacttcagatgttactggttttccattgtcatgtcttgctgatgccacaggttgaaggaaaggattcactttgcagtgttctatggaatttgtaccattattacaagcaattctttgaccgggtccaggccaaaattgtggaacttcgttcccccctagaaaaagaacttaaagaatttgttaagatttccaagtggaatgatgtcagcttctggtccattaagcaatctgtagaaaagacacacaggacactctttaaattcatgaagaaatttgaagcagtcctgagtgaaccctgccggtcatccctggtggagagtgacaaggaagaacagcctgactttttgcccaggccaacagatggagctgcaagtgaactgtcttccattcagaatctgaacagggcactgagggagaccctgttagcccaaccagcagctgggcaggccacaattccagagtggtgtcagggcgctgctccttccggcttggaaggggagcttctgcgtcgcttgccaaagctcaggaaacgcatgaggaagatgtgcctgacgttcatgaaggagagccccctgcctcgccttgtggagggccttgatcagttcacaggtgaagtgatttcctctgtgagtgagctgcagagcttaaaggtggaaccctctgcagagaaggagaagcagcggtcagaagccaagcacattctcatgcaaaaacagcgagctttgtcagacctctttaaacaccttgcaaaaattggtttgtcgtatcgcaaaggtcttgcttgggcccgttcaaaaaaccctcaagagatgcttcatcttcacccattagatctccagagcgcattgtccatcgtcagcagcactcaggaggctgattctaggctgcttacagaaatctcgtcttcatgggatggatgccagaagtatttttatcgctctcttgcacggcatgccaggcttaacgcagcactagcaactcctgccaaggaaatgggcatgggcaacgtggagaggtgcagagggttctcagcacatttgatgaagatgctcgtccgacagcggcgctccctgaccacgctcagtgagcagtggatcatcctcaggaacctcctcagctgtgtgcaagagattcacagcaggctgatggggccccaggcctaccccgtggccttcccccctcaggatggcgtgcagcagtggacagagcgcctgcagcacctggccatgcagtgccagatcctgcttgagcagctctcctggctcctccagtgctgccccagtgtagggccagctccaggccatggcaatgtccaggtactggggcagcctcctggcccctgcctggaaggaccagaacttagcaagggacaactttgtggagtagtgctggacctaattccttccaatctgagctacccatctccaatacctggaagtcagctgccctctggttgccggatgcggaaacaggatcacctttggcaacagtcaactacgagattaacagagatgctaaaaaccattaaaacagtgaaagctgacgtcgacaaaattagacagcagtcttgtgagactctctttcattcttggaaagattttgaagtttgctcttctgcgctgagttgcttgtcccaggtgtcagttcatttgcagggcctagagtccttgttcattcttccagggatggaggttgagcaaagagactcacaaatggcactagttgaaagtctggaatatgtaagaggagaaattagtaaagccatggctgactttactacctggaagacccatctgcttacttcagatagccaaggaggaaatcaaatgttggacgaaggatttgtggaagatttttcagagcaaatggaaattgccatccgagccatcctctgtgccatccagaacttagaagaaagaaagaatgaaaaagcagaggagaacactgaccaagcaagcccacaagaagattatgcaggctttgagagactgcaatcaggacatctaacaaaactcttagaggatgacttctgggccgatgtgagcactttgcacgtgcagaaaataatttctgccatctccgagctgttggagaggctgaaatcgtacggtgaggatggcacagcagcaaagcacctgttcttcagccaatcctgttccttgctggtgcgcctggtgccggtcctctccagctactcagacctcgtcctcttcttcctgaccatgtctttagcaactcaccgtagtactgcaaagctgctctctgtgcttgcccaggtctttacagagcttgcccagaagggattttgcttgcccaaagaatttatggaagattcagctggagagggagcaactgagttccatgactatgagggaggtggaattggagaaggcgagggcatgaaggatgtgagtgaccagatcggaaatgaagaacaggtggaagatacatttcagaagggtcaagaaaaagacaaagaggatcctgattcaaaatctgatattaagggcgaggataatgccattgagatgtcggaagattttgatgggaaaatgcatgatggggagcttgaagaacaagaagaggatgatgagaaatcagatagtgagggcggagacctggataaacacatgggcgatctcaatggtgaggaagctgacaaactagatgagaggctttggggtgatgatgatgaggaggaagatgaggaggaagaagacaataaaactgaagaaacaggaccaggaatggatgaggaagattctgaacttgttgctaaagatgacaacttggatagtggcaattcaaacaaagataaaagccagcaagataagaaggaagaaaaggaagaagcagaagctgatgatggtggacaaggtgaagacaaaattaatgaacaaatagatgagagggactatgatgaaaatgaggtggacccttaccatggcaatcaggaaaaggtgccagaacccgaggctttggaccttccagatgacttgaacctcgacagtgaagacaagaatggtggtgaggacaccgacaatgaagaaggagaagaagagaatcctttggagataaaagaaaaaccagaagaagcaggtcatgaagctgaggaaagaggagagaccgagaccgaccagaacgaaagtcagagtccacaggagcctgaggaaggccccagtgaagatgacaaggcagaaggggaagaggaaatggacacaggagctgatgaccaagatggagatgctgctcagcatcctgaagaacactctgaggagcagcagcagtctgtggaggaaaaagacaaggaagccgatgaagaaggtggagagaatggccctgctgaccaaggtttccagccccaggaggaagaagaacgggaggactctgatacagaggagcaggtgccagaggctttggagaggaaggagcatgcctcctgtgggcagactggtgtggagaacatgcagaacacacaggccatggagctggctggggccgcacctgagaaggagcaggggaaagaggaacacggaagtggagctgcagatgcaaaccaggcagaaggccatgaatcgaatttcattgcccagttggcctcccagaagcacaccaggaaaaacacacagagttttaagaggaaacctgggcaggctgacaatgaacgttccatgggtgatcacaatgagcgtgtgcacaagaggctgaggactgtggatacggacagccatgccgagcaggggccagctcagcagccccaggcccaggtggaggatgcagatgcattcgagcacattaaacaaggcagtgacgcatacgatgcacagacctatgatgtggccagcaaagaacagcaacagtctgcaaaagactctggcaaagatcaggaagaggaggagatagaggacacccttatggacacagaggagcaggaggagttcaaagcagcagacgtggagcagctgaagccagaggaaatcaagtcgggcaccacagcacccttgggctttgatgagatggaagtggagatccaaactgttaaaacagaggaagaccaagaccccagaacagacaaagcccataaggagacagaaaatgagaaaccagaaagaagccgagagtctaccattcatacagctcatcaattcctcatggacacgatcttccagccctttttaaaagatgtcaatgagctaagacaggagctggagagacagctggaaatgtggcagccacgtgaatctggaaacccagaggaggagaaggttgcagctgagatgtggcagagttacctgatcttaacagcgcctctttcacaacggttatgtgaagagcttcgtctcatattagagcctacccaggcagccaagctgaaaggagactatcgaactgggaaacgactaaacatacggaaagtcattccatacattgctagtcaatttcggaaagacaagatttggcttcgaaggaccaagcccagtaaacgccagtatcagatttgtttggctatcgatgactcttctagtatggtagacaatcataccaagcagcttgcatttgaatctttggctgtgattggaaatgctctaaccctcctggaagtgggtcagattgcagtgtgtagttttggagaatctgtaaagctgttacacccatttcatgagcagttcagtgattactctgggtcccagattctacgtctctgcaaattccaacaaaagaaaaccaagattgctcagtttctagagtctgttgccaacatgtttgcagctgctcagcagctctcgcagaacatcagttcagaaactgcacaactcctcctggtagtctctgatgggcgaggccttttccttgagggcaaagaaagagtcctggcagcagttcaggctgcccggaatgcaaatatctttgtcatctttgttgtattggacaatcccagttcacgggattctatcttggacattaaagtaccgatatttaaaggacctggagagatgcctgaaatccgatcctacatggaagagttcccattcccatactatatcattcttcgagatgtaaacgcacttcctgagacactcagcgatgccctcagacagtggtttgagttggtgacagcctctgaccacccatagaacagaaagaagagtccaaagtgagacttaactgtggtcagaaggtcacattgcttacccaggtgctcccttttggacaactacaaaaaattttattgtaatatttttattttacaacgtgatcttacagcctacagaatgctctctggctcccggctttgcctgggctgaggtttttataccaaacctggaagcagcagcaggtgcctgaactcgtaactagagaagagttatccttcttccctgccttggaagccctggcctgggaggaggtcataccccaccgttggagcccagctgcctgttttcttttgcaggggatctgggcacctgtgccttgaggagatgctgccaggagcatgggactctgacagtcctttgtataaaggactaaagggagctgcccttttgaccctgttctaagctctgccttgccaagcccatagtgtgtgcccaaaagctgtcaagtggccaagacagctcgtttctggagagtatgagggtgtgttttcttattgtgaaaggaactaccttctcttagagggtaggaagaatgtggtgtgtgtgtgttctcataaagcaactggacattataggtgcccaggtcatctataaaaacgatccttgggctgtgtaaaaatgaagtggcttttcagtatcctctttcacacttgctgcttcgggagactatgcaatgatgggaaggtgattgcccctttatttcattcagtgccatggtccctgttgttgtagtaatttatttgtttagttcatttttttttttcttaacagtcaaggggaagagtgattcctcacactgctttcaagctggactgagccagtctcattctgggaaagaaacgctgtgtccagaactcagcagctccatctattttttccagtcgaaagaaactgatctttaggcagtttttacttggccagaaagcagtgctgaatacttgaaactgtgtgctctgttctacttaatgttctgtcagaatgttcttttgtaggcagtatgtcatgatgtaatcatctatctccttgtctgtttccaagttacactgtgaagtctgcgacccttttgaggtggtcatcaaagacacagattccttgtttaaccaagtgtcccaaagcatgtacctgaagttatatcattttttattctaaaaagctatgcagcttatattctgaaaactattaaaacatataccactgttgttgatgtaatttgtgactcttcttaatggaagatgacaggattgtaaaaggtatgctaggggactgatcttctctgctggatcagtcagtcagctgttactagttgatgctgtgctaacatgatcccctcctacttccatgttgctcttactacaaaggttatcatttgcatttatgtccatggtaggctgagctataatatgctggctttgcagcagaatgaaaaggatgagttggtgtagccttataa

SEQ ID NO: 51 - protein, 3863 aa, Homo sapiens
MNAQRLLRATKLKKPILLEGSPGVGKTSLVGALAKASGNTLVRINLSEQTDITDLFGADLPVEGGKGGEFAWRDGPLLAALKAGHWVVLDELNLASQSVLEGLNACFDHRGEIYVPELGMSFQVQHEKTKIFGCQNPFRQGGGRKGLPRSFLNRFTQVFVDPLTVIDMEFIASTLFPAIEKNIVKKMVAFNNQIDHEVTVEKKWGQKGGPWEFNLRDLFRWCQLMLVDQSPGCYDPGQHVFLVYGERMRTEEDKKKVIAVFKDVFGSNSNPYMGTRLFRITPYDVQLGYSVLSRGSCVPHPSRHPLLLLHQSFQPLESIMKCVQMSWMVILVGPASVGKTSLVQLLAHLTGHTLKIMAMNSAMDTTELLGGFEQVDLIRPWRRLLEKVEGTVRALLRDSLLISADDAEVVLRAWSHFLLTYKPKCLGEGGKAITMEIVNKLEAVLLLMQRLNNKINSYCKAEFAKLVEEFRSFGVKLTQLASGHSHGTFEWVDSMLVQALKSGDWLLMDNVNFCNPSVLDRLNALLEPGGVLTISERGMIDGSTPTITPNPNFRLFLSMDPVHGDISRAMRNRGLEIYISGEGDASTPDNLDLKVLLHSLGLVGNSVCDILLALHTETRSTVVGSPTSSVSTLIQTAILIVQYLQRGLSLDRAFSEACWEVYVCSQHSPANRKLVQALLEKHVSSLRAHETWGDSILGMGLWPDSVPSALFATEDSHLSTVRRDGQILVYCLNRMSMKTSSWTRSQPFTLQDLEKIMQSPSPENLKFNAVEVNTYWIDEPDVLVMAVKLLIERATNQDWMLRVKWLYHLAKNIPQGLESIQIHLEASAASLRNFYSHSLSGAVSNVFKILQPNTTDEFVIPLDPRWNMQALDMIRNLMDFDPQTDQPDQLFALLESAANKTIIYLDREKRVFTEANLVSVGSKKLRESVLRMSFEFHQDPESYHTLPHEIVVNLAAFFELCDALVLLWVQSSQGMVSDASANEILGSLRWRDRFWTVADTVKVDAPGLALLALHWHWVLKHLVHQIPRLLMNYEDKYYKEVQTVSEHIQNCLGSQTGGFAGIKKLQKFLGRPFPFKDKLVVECFSQLKVLNKVLAIREQMSALGESGWQEDINRLQVVASQWTLKKSLLQAWGLILRANILEDVSLDELKNFVHAQCLELKAKGLSLGFLEKKHDEASSLSHPDLTSVIHLTRSVQLWPAMEYLAMLWRYKVTADFMAQACLRRCSKNQQPQINEEISHLISFCLYHTPVTPQELRDLWSLLHHQKVSPEEITSLWSELFNSMFMSFWSSTVTTNPEYWLMWNPLPGMQQREAPKSVLDSTLKGPGNLNRPIFSKCCFEVLTSSWRASPWDVSGLPILSSSHVTLGEWVERTQQLQDISSMLWTNMAISSVAEFRRTDSQLQGQVLFRHLAGLAELLPESRRQEYMQNCEQLLLGSSQAFQHVGQTLGDMAGQEVLPKELLCQLLTSLHHFVGEGESKRSLPEPAQRGSLWVSLGLLQIQTWLPQARFDPAVKREYKLNYVKEELHQLQCEWKTRNLSSQLQTGRDLEDEVVVSYSHPHVRLLRQRMDRLDNLTCHLLKKQAFRPQLPAYESLVQEIHHYVTSIAKAPAVQDLLTRLLQALHIDGPRSAQVAQSLLKEEASWQQSHHQFRKRLSEEYTFYPDAVSPLQASILQLQHGMRLVASELHTSLYSSMVGADRLGTLATALLAFPSVGPTFPTYYAHADTLCSVKSEEVLRGLGKLILKRSGGKELEGKGQKACPTREQLLMNALLYLRSHVLCKGELDQRALQLFRHVCQEIISEWDEQERIAQEKAEQESGLYRYRSRNSRTALSEEEEEEREFRKQFPLHEKDFADILVQPTLEENKGTSDGQEEEAGTNPALLSQNSMQAVMLIHQQLCLNFARSLWYQQTLPPHEAKHYLSLFLSCYQTGASLVTHFYPLMGVELNDRLLGSQLLACTLSHNTLFGEAPSDLMVKPDGPYDFYQHPNVPEARQCQPVLQGFSEAVSHLLQDWPEHPALEQLLVVMDRIRSFPLSSPISKFLNGLEILLAKAQDWEENASRALSLRKHLDLISQMIIRWRKLELNCWSMSLDNTMKRHTEKSTKHWFSIYQMLEKHMQEQTEEQEDDKQMTLMLLVSTLQAFIEGSSLGEFHVRLQMLLVFHCHVLLMPQVEGKDSLCSVLWNLYHYYKQFFDRVQAKIVELRSPLEKELKEFVKISKWNDVSFWSIKQSVEKTHRTLFKFMKKFEAVLSEPCRSSLVESDKEEQPDFLPRPTDGAASELSSIQNLNRALRETLLAQPAAGQATIPEWCQGAAPSGLEGELLRRLPKLRKRMRKMCLTFMKESPLPRLVEGLDQFTGEVISSVSELQSLKVEPSAEKEKQRSEAKHILMQKQRALSDLFKHLAKIGLSYRKGLAWARSKNPQEMLHLHPLDLQSALSIVSSTQEADSRLLTEISSSWDGCQKYFYRSLARHARLNAALATPAKEMGMGNVERCRGFSAHLMKMLVRQRRSLTTLSEQWIILRNLLSCVQEIHSRLMGPQAYPVAFPPQDGVQQWTERLQHLAMQCQILLEQLSWLLQCCPSVGPAPGHGNVQVLGQPPGPCLEGPELSKGQLCGVVLDLIPSNLSYPSPIPGSQLPSGCRMRKQDHLWQQSTTRLTEMLKTIKTVKADVDKIRQQSCETLFHSWKDFEVCSSALSCLSQVSVHLQGLESLFILPGMEVEQRDSQMALVESLEYVRGEISKAMADFTTWKTHLLTSDSQGGNQMLDEGFVEDFSEQMEIAIRAILCAIQNLEERKNEKAEENTDQASPQEDYAGFERLQSGHLTKLLEDDFWADVSTLHVQKIISAISELLERLKSYGEDGTAAKHLFFSQSCSLLVRLVPVLSSYSDLVLFFLTMSLATHRSTAKLLSVLAQVFTELAQKGFCLPKEFMEDSAGEGATEFHDYEGGGIGEGEGMKDVSDQIGNEEQVEDTFQKGQEKDKEDPDSKSDIKGEDNAIEMSEDFDGKMHDGELEEQEEDDEKSDSEGGDLDKHMGDLNGEEADKLDERLWGDDDEEEDEEEEDNKTEETGPGMDEEDSELVAKDDNLDSGNSNKDKSQQDKKEEKEEAEADDGGQGEDKINEQIDERDYDENEVDPYHGNQEKVPEPEALDLPDDLNLDSEDKNGGEDTDNEEGEEENPLEIKEKPEEAGHEAEERGETETDQNESQSPQEPEEGPSEDDKAEGEEEMDTGADDQDGDAAQHPEEHSEEQQQSVEEKDKEADEEGGENGPADQGFQPQEEEEREDSDTEEQVPEALERKEHASCGQTGVENMQNTQAMELAGAAPEKEQGKEEHGSGAADANQAEGHESNFIAQLASQKHTRKNTQSFKRKPGQADNERSMGDHNERVHKRLRTVDTDSHAEQGPAQQPQAQVEDADAFEHIKQGSDAYDAQTYDVASKEQQQSAKDSGKDQEEEEIEDTLMDTEEQEEFKAADVEQLKPEEIKSGTTAPLGFDEMEVEIQTVKTEEDQDPRTDKAHKETENEKPERSRESTIHTAHQFLMDTIFQPFLKDVNELRQELERQLEMWQPRESGNPEEEKVAAEMWQSYLILTAPLSQRLCEELRLILEPTQAAKLKGDYRTGKRLNIRKVIPYIASQFRKDKIWLRRTKPSKRQYQICLAIDDSSSMVDNHTKQLAFESLAVIGNALTLLEVGQIAVCSFGESVKLLHPFHEQFSDYSGSQILRLCKFQQKKTKIAQFLESVANMFAAAQQLSQNISSETAQLLLVVSDGRGLFLEGKERVLAAVQAARNANIFVIFVVLDNPSSRDSILDIKVPIFKGPGEMPEIRSYMEEFPFPYYIILRDVNALPETLSDALRQWFELVTASDHP

SEQ ID NO: 52 - DNA, 5384 bp, Homo sapiens
  CDS (290)..(2434)
cttttctcaagtctctcgttccacctgaggagaaatgcccacagctgtggaggcgcaggccactccatctggtgcccaacgtggatgcttttctctagggtgaagggactctcgagtgtggtcattgaggacaagtcaacgagagattcccgagtacgtctacagtgagccttgtgggtgaaggtactctacagtgtggtcattgaggacaagttgacgagagagtcccaagtacgtccacggtcagccttgcggtaagcttgtgtgcttagaggaacccagggtaacgatggggcaaactgaaagtaaatatgcctcttatctcagctttattaaaattcttttaagaagagggggagttagagcttctacagaaaatctaattacgctatttcaaacaatagaacaattctgcccatggtttccagaacagggaactttagatctaaaagattgggaaaaaattggcaaagaattaaaacaagcaaatagggaaggtaaaatcatcccacttacagtatggaatgattgggccattattaaagcaactttagaaccatttcaaacaggagaagatattgtttcagtttctgatgcccctaaaagctgtgtaacagattgtgaagaagaggcagggacagaatcccagcaaggaacggaaagttcacattgtaaatatgtagcagagtctgtaatggctcagtcaacgcaaaatgttgactacagtcaattacaggagataatataccctgaatcatcaaaattgggggaaggaggtccagaatcattggggccatcagagcctaaaccacgatcgccatcaactcctcctcccgtggttcagatgcctgtaacattacaacctcaaacgcaggttagacaagcacaaaccccaagagaaaatcaagtagaaagggacagagtctctatcccggcaatgccaactcagatacagtatccacaatatcagccggtagaaaataagacccaaccgctggtagtttatcaataccggctgccaaccgagcttcagtatcggcctccttcagaggttcaatacagacctcaagcggtgtgtcctgtgccaaatagcacggcaccataccagcaacccacagcgatggcgtctaattcaccagcaacacaggacgcggcgctgtatcctcagccgcccactgtgagacttaatcctacagcatcacgtagtggacagggtggtgcactgcatgcagtcattgatgaagccagaaaacagggcgatcttgaggcatggcggttcctggtaattttacaactggtacaggccggggaagagactcaagtaggagcgcctgcccgagctgagactagatgtgaacctttcaccatgaaaatgttaaaagatataaaggaaggagttaaacaatatggatccaactccccttatataagaacattattagattccattgctcatggaaatagacttactccttatgactgggaaattttggccaaatcttccctttcatcctctcagtatctacagtttaaaacctggtggattgatggagtacaagaacaggtacgaaaaaatcaggctactaagcccactgttaatatagacgcagaccaattgttaggaacaggtccaaattggagcaccattaaccaacaatcagtgatgcagaatgaggctattgaacaagtaagggctatttgcctcagggcctggggaaaaattcaggacccaggaacagctttccctattaattcaattagacaaggctctaaagagccatatcctgactttgtggcaagattacaagatgctgctcaaaagtctattacagatgacaatgcccgaaaagttattgtagaattaatggcctatgaaaatgcaaatccagaatgtcagtcggccataaagccattaaaaggaaaagttccagcaggagttgatgtaattacagaatatgtgaaggcttgtgatgggattggaggagctatgcataaggcaatgctaatggctcaagcaatgagggggctcactctaggaggacaagttagaacatttgggaaaaaatgttataattgtggtcaaatcggtcatctgaaaaggagttgcccaggcttaaataaacagaatataataaatcaagctattacagcaaaaaataaaaagccatctggcctgtgtccaaaatgtggaaaagcaaaacattgggccaatcaatgtcattctaaatttgataaagatgggcaaccattgtctggaaacaggaagaggggccagcctcaggccccccaacaaactggggcattcccagttaaactgtttgttcctcagggttttcaaggacaacaacccctacagaaaataccaccacttcagggagtcagccaattacaacaatccaacagctgtcccgcgccacagcaggcagcaccgcagtagatttatgttccacccaaatggtctttttactccctggaaagcccccacaaaagattcctagaggggtatatggcccgctgccagaagggagggtaggcctttgagggagatcaagtctaaatttgaagggagtccaaattcatactggggtaatttattcagattataaagggggaattcagttagtgatcagctccactgttccccggagtgccaatccaggtgatagaattgctcaattactgcttttgccttatgttaaaattggggaaaacaaaaaggaaagaacaggagggtttggaagtaccaaccctgcaggaaaagctgcttattgggctaatcaggtctcagaggatagacccgtgtgtacagtcactattcagggaaagagtttgaaggattagtggatacccaggctgatgtttctgtcatcggcataggtactgcctcagaagtgtatcaaagtgccatgattttacattgtccaggatctgataatcaagaaagtacggttcagcctgtgatcacttcattccaatcaatttatggggccgagacttgttacaacaatggcatgcagagattactatcccagcctccctatacagccccaggaataaaaaaatcatgactaaaatgggatagctccctaaaaagggactaggaaagaagtcccaattgaggctgaaaaaaatcaaaaaagaaaaggaatagggcatcctttttaggagcggtcactgtagagcctccaaaacccattccattaacttgggggaaaaaaaaacaactgtatggtaaatcagcagcgcttccaaaacaaaaactggaggctttacatttattagcaaagaaacaattagaaaaaggacattgagccttcattttcgccttggaattctgtttgtaattcagaaaaaatccggcagatggcgtataatgccgtaattcaacccatgggggctctcccaccccggttgccctctccagccatggtcccctttaattataattgatctgaaggattgcttttttaccattcctctggcaaaacaggattttgaaaaatttgcttttaccacaccagcctaaataataaagaaccagccaccaggtttcagtggaaagtattgcctcagggaatgcttaatagttcaactatttgtcagctcaagctctgcaaccagttagagacaagttttcagactgttacatcgttcactatgttgatattttgtgtgctgcagaaacgagagacaaattaattgaccgttacacatttctgcagacagaggttgccaacgcgggactgacaataacatctgataagattcaaacctctactcctttccgttacttgggaatgcaggtagaggaaaggaaaattaaaccacaaaaaatagaaataagaaaagacacattaaaagcattaaatgagtttcaaaagttgctaggagatactaattggatttggagatattaattggatttggccaactctaggcattcctacttatgccatgtcaaatttgttctctttcttaagaggggactcggaattaaatagtgaaagaacgttaactccagaggcaactaaagaaattaaattaattgaagaaaaaattcggtcagcacaagtaaatagaatagatcacttggccccactccaaattttgatttttgctactgcacattccctaacaggcatcattgttcaaaatacagatcttgtggagtggtccttccttcctcacagtacaattaagacttttacattgtacttggatcaaatggctacattaattggtcagggaagattatgaataataacattgtgtggaaatgacccagataaaatcactgttcctttcaacaagcaacaggttagacaagcctttatcaattctggtgcatggcagattggtcttgccgattttgtgggaattattgacaatcgttaccccaaaacaaaaatcttccagtttttaaaattgactacttggattttacctaaagttaccaaacataagcctttaaaaaatgctctggcagtgtttactgatggttccagcaatggaaaagtggcttacaccgggccaaaagaatgagtcatcaaaactcagtatcacttgactcaaagagcagagttggttgccgtcattacagtgttaacaagattttaatcagtctattaacattgtatcagattctgcatatgtagtacaggctacaaaggatattgagagagccctaatcaaatacattatggatgatcagttaaacccgctgtttaatttgttacaacaaaatgtaagaaaaagaaatttcccattttatattactcatattcgagcacacactaatttaccagggcctttaactaaagcaaatgaacaagctgacttgctagtatcatctgcattcatggaagcacaagaacttcatgccttgactcatgtaaatgcaataggattaaaaaataaatttgatatcacatggaaacagacaaaaaatattgtacaacattgcacccagtgtcagattctacacctggccactcaggaggcaagagttaatcccagaggtctatgtcctaatgtgttatggcaaatggatgtcatgcacgtaccttcatttggaaaattgtcatttgtccatgtgacagttgatacttattcacatttcatatgggcaacctgccagacaggagaaagtacttcccatgttaaaagacatttattatcttgttttcctgtcatgggagttccagaaaaagttaaaacagacaatgggccaggttactgtagtaaagcagttcaaaaattcttaaatcagtggaaaattacacatacaataggaattctctataattcccaaggacaggccataattgaaagaactaatagaacactcaaagctcaattggttaaacaaaaaaaaaaaaaaaaaa

SEQ ID NO: 53 - protein, 715 aa, Homo sapiens
MGQTESKYASYLSFIKILLRRGGVRASTENLITLFQTIEQFCPWFPEQGTLDLKDWEKIGKELKQANREGKIIPLTVWNDWAIIKATLEPFQTGEDIVSVSDAPKSCVTDCEEEAGTESQQGTESSHCKYVAESVMAQSTQNVDYSQLQEIIYPESSKLGEGGPESLGPSEPKPRSPSTPPPVVQMPVTLQPQTQVRQAQTPRENQVERDRVSIPAMPTQIQYPQYQPVENKTQPLVVYQYRLPTELQYRPPSEVQYRPQAVCPVPNSTAPYQQPTAMASNSPATQDAALYPQPPTVRLNPTASRSGQGGALHAVIDEARKQGDLEAWRFLVILQLVQAGEETQVGAPARAETRCEPFTMKMLKDIKEGVKQYGSNSPYIRTLLDSIAHGNRLTPYDWEILAKSSLSSSQYLQFKTWWIDGVQEQVRKNQATKPTVNIDADQLLGTGPNWSTINQQSVMQNEAIEQVRAICLRAWGKIQDPGTAFPINSIRQGSKEPYPDFVARLQDAAQKSITDDNARKVIVELMAYENANPECQSAIKPLKGKVPAGVDVITEYVKACDGIGGAMHKAMLMAQAMRGLTLGGQVRTFGKKCYNCGQIGHLKRSCPGLNKQNIINQAITAKNKKPSGLCPKCGKAKHWANQCHSKFDKDGQPLSGNRKRGQPQAPQQTGAFPVKLFVPQGFQGQQPLQKIPPLQGVSQLQQSNSCPAPQQAAPQ

SEQ ID NO: 54 - DNA, 8467 bp, Homo sapiens
  CDS (1)..(5232)
atggaagaaaatgaaagccagaaatgtgagccgtgccttccttactcagcagacagaagacagatgcaggaacaaggcaaaggcaatctgcatgtaacatcaccagaagatgcagaatgccgcagaaccaaggaacgcctttctaatggaaacagtcgtggttcagtttccaagtcttcccgcaatatcccaaggagacacaccctaggggggccccgaagttccaaggaaatactgggaatgcaaacatctgagatggatcggaagagagaagcgttcctagaacatctgaagcagaagtacccccaccacgcctctgcaatcatgggtcaccaagagaggctgagagaccagacaaggagccccaaactgtctcacagtcctcaaccacccagtctgggtgacccggtcgagcatttatcagagacgtccgctgattctttggaagccatgtctgagggggatgctccaacccctttttccagaggcagccggactcgtgcgagccttcctgtggtgaggtcaaccaaccagacgaaagaaagatctctgggggttctctatctccagtatggagatgaaaccaagcagctcaggatgccgaatgaaatcacaagtgcagacacaatccgtgctctcttcgtaagtgcctttccacagcagctcaccatgaaaatgctggaatcgcccagtgtcgccatttacatcaaagatgaaagcagaaatgtctattatgaattaaatgatgtaaggaacattcaagacagatcactcctcaaagtgtacaacaaggatcctgcacatgcgtttaatcacacaccaaaaactatgaatggagacatgaggatgcagagagaacttgtttatgcaagaggagatggccctggggcccctcgccccggatctactgctcatccaccccatgcgattccaaattccccaccgtctactccagtgccccattccatgcccccctccccgtccagaattccttatgggggcacccgctccatggttgttcctggcaatgccaccatccccagggacagaatctccagcctgccagtctccagacccatctctccaagcccaagcgccattttagaaagaagagatgtcaagcctgatgaagacatgagtggcaaaaacattgcaatgtacagaaatgagggtttctatgctgatccttacctttatcacgagggacggatgagcatagcctcatcccatggtggacacccactggatgtccccgaccacatcattgcatatcaccgcaccgccatccggtcagcgagtgcttattgtaacccctcaatgcaagcggaaatgcatatggaacaatcactgtacagacagaaatcaaggaaatatccggatagccatttgcctacactgggctccaaaacaccccctgcctctcctcacagagtcagtgacctgaggatgatagacatgcacgctcactataatgcccacggcccccctcacaccatgcagccagaccgggcctctccgagccgccaggcctttaaaaaggagccaggcaccttggtgtatatagaaaagccacggagcgctgcaggattatccagccttgtagacctcggccctcctctaatggagaagcaagtttttgcctacagcacggcgacaatacccaaagacagagagaccagagagaggatgcaagccatggagaaacagattgccagtttaactggccttgttcagtctgcgctttttaaagggcccattacaagttatagcaaagatgcgtctagcgagaaaatgatgaaaaccacagccaacaggaaccacacagatagtgcaggaacgccccatgtgtctggtgggaagatgctcagtgctctggagtccacggtgcctcccagccagcctccacctgtgggcacctcagccatccacatgagcctgcttgagatgaggcggagcgtggcggaactcaggctccagctccagcagatgcggcagctccagctgcagaaccaggagttgctgagggcaatgatgaagaaggccgagctggaaatcagtggcaaagtgatggaaacaatgaagagactggaggatcccgtgcagcgacagcgcgtcctagtggagcaagagagacaaaaatatcttcatgaggaagagaagatcgtcaagaagttgtgcgagttggaagactttgttgaagacttgaagaaggactccacggcagccagccgattggttactctgaaagacgtggaagacggggctttcctcctgcgtcaagtgggagaggctgtagctaccctgaaaggagaatttccaaccttacaaaacaagatgcgagccatcctgcgcatagaagtggaggccgtgcggtttctgaaggaggagccacacaagctggacagtctcctgaagcgtgtgcgcagcatgacagacgtcctgaccatgctgcggagacatgtcactgatgggctcctgaaaggcacggacgcagcccaagccgcacagtacatggctatggaaaaggccacagccgcagaagtcctgaagagtcaggaggaggcagcccacacctccggccagcccttccacagcacaggtgcccctggcgatgcgaagtcggaagtggtgcctttgtccggcatgatggttcgccacgcgcagagctcccctgtggtcatccagccctcccagcactccgtggccctgctgaaccctgctcagaacttgcctcacgtggccagctccccagccgtcccccaggaagcaacctccactctgcagatgtcgcaggctccgcagtccccacagatacccatgaatgggtctgccatgcagagcttgttcattgaagaaatccacagtgtgagtgccaagaacagggcagtgtctatcgagaaagcagaaaagaaatgggaggaaaaaaggcaaaatctggatcactataatgggaaagagtttgagaagctcctagaagaagctcaggccaatatcatgaagtcaataccaaatctggagatgccgccagccacaggcccactgccaaggggagatgccccagtggacaaggtggaactttcagaagattctccaaattcggaacaggacttggaaaagctggggggaaagtcgccccctcctcctccgccacctcctcgtcgaagctacctgccaggatcgggactcaccaccacgaggtcaggcgatgtggtctacaccggcagaaaggagaacatcaccgctaaggcaagcagtgaagatgctggaccaagcccacagaccagagctacaaaatatccagcagaggagcctgcttcagcctggaccccatccccaccgcctgtcaccacctcctcctcaaaggatgaggaggaagaagaagaagaaggagacaaaataatggcagaactccaggcattccagaagtgttcctttatggatgtaaattcaaacagtcatgctgagccatcccgggctgacagtcacgttaaagacactaggtcgggcgccacagtgccacccaaggagaagaagaatttggaatttttccatgaagatgtacggaaatctgatgttgaatatgaaaatggcccccaaatggaattccaaaaggttaccacaggggctgtaagacctagtgaccctcctaagtgggaaagaggaatggagaatagtatttctgatgcatcaagaacatcagaatataaaactgagatcataatgaaggaaaattccatatccaatatgagtttactcagagacagtagaaactattcccaggaaactgtgcctaaggccagtttcggtttctctggcattagtccattagaagatgaaataaacaaagggtctaaaatctcaggcctgcaatactctatacctgacaccgagaaccagacgctgaattacggaaagacaaaggagatggaaaagcaaaatacggataagtgtcacgtttcctctcacactagactaacagaatcaagcgtgcatgattttaaaacagaagatcaagaggttatcacgacagattttggccaagttgttctaagacccaaggaggcaaggcatgctaacgtgaaccctaatgaggatggagaatcaagttcaagttctcccactgaagaaaatgcagccactgacaatattgccttcatgattaccgaaaccactgtccaggttctttccagtggggaggtgcatgatattgttagccaaaagggagaagacatacagacggttaatatcgatgccagaaaagagatgaccccccgacaagaagggactgacaatgaggatccagtcgtgtgcctggacaagaaaccagtgatcatcattttcgatgagcccatggacatccggtctgcctataagagactttcaactatctttgaggaatgtgatgaggaattagagagaatgatgatggaggaaaagatagaggaggaggaagaggaggaaaatggggattctgtagtccagaataataacacttcccagatgtctcataagaaggtggccccaggcaatcttagaaccggacaacaggtggaaacaaagtcacagccacactccctggccacagagaccagaaacccaggaggacaggaaatgaacagaacggagctgaacaagttcagccacgtggattctccaaattcggaatgcaagggtgaggacgcgaccgatgaccagtttgaaagccccaagaaaaagtttaaattcaaattccctaagaagcaactcgccgctctcactcaagccattcgcaccggaactaaaacagggaagaagactttgcaagtggtagtctatgaagaagaggaagaggatggcaccctgaaacagcacaaagaagccaagcgcttcgaaatcgctaggtctcaacctgaagacacccctgaaaacacagtgaggaggcaagagcagcccagcatcgagagtacatctccgatttcaagaactgatgaaattagaaaaaacacctacagaacattggatagcctggagcagaccattaaacagctcgaaaatacaatcagtgaaatgagtcccaaagccctagttgatacctcatgttcttccaacagagattctgttgcaagttcatcccacatagcccaagaggcctctccccgacccttgctagttccggatgaaggtcccactgccctagagccccctacgtcgataccttcagcttcacgtaaggtatcttggtctgctggaaaatgaaaagacccagctgctttcctaaatctgccataatcaccattagtgaaaggtgtcttgtaacttaattgctttctttcaggtggcttttttttttttgtctgttcgccatgaaacccttctttcatactttctccctcaccttccaaacaacaacaactaggtatctaacagctaatcagttctgtttttgcctctgttgctgactggtgttgggtaaacacgaggctgctgggtcagccatgtgctgttgaaatggttgctctgatactcacattaaaatccgtttgatcagtagtgagcagttgattctgtttgattcttctgattaaccccagttggtgtctcctagatctgtcctgcatgtagggctgtggcttctcaccttgagcttctctgcacatcgtggggcagcctcacagatgacctactcatgcgcttctccttctcttccccctctcactggtccttcccacagggctccagcggggccccacagacgagcaggatgcctgtccccatgagtgccaagaacagacccggaaccctggacaaacccggcaagcagtccaaactgcaggatccccgccaatatcgtcaggtagttttaccttaaacccacttttggatggacgctatttcagttaagcaagtcactgacttagtttataccaaatattgtgctttctttgtaagataacggtttacatagacatcctggatctgggggcatgaagaaagtctaaataaacctttgttacacttttttaccacgcttttgcatgcttgcaataaaacatcttttactttgtgactccaaactccaaattttaactgttaacacacggtgccagaccaggtggcttttctttggtgaatgtagtgtttcatctgaacacctcgggaagcagagacaaaccaacctgtggttgaactgcccttaacgtcaccactactaacgtctatgttgactgtattgtgttagaagcacattaacactccgtcacaatgcccgacccccaccccagtaattatccagacgcatggcccacctggcacacaggaaatggtagagctggaatgatgggactcctctcacaaatgtattcttcctttcctcctttcccgtccatcctttgctatgtacatggggggtttctaccaggtccagtagagcacaacaagacttagctcaggccttgaactgtgtttggttggttttctttgattgaattattctcagaagggctgtgttgccaggccctgtgggttgatcatgtgaccgcctttctgacaaaatgtctcccgccatctttatttgcaggctaatggaagtgctaagaaatctggtggggactttaagcctacttccccctccttacctgcttctaagattccagccctttctcccagctctgggaaaagcagttctctgccctcttctagtggtgacagctctaacctccctaatccacctgctactaaaccatcgattgcttctaaccctctcagcccccaaacaggaccacctgctcactctgcctccctcatcccttctgtctctaatggctctttgaagtttcagagcctcactcatacaggtaaaggtcaccatctttcattctcaccgcagagtcaaaatggccgagcaccccctcctttgtcattttcctcctcccctccttctcctgcctcctccgtctcactgaatcaaggtgccaagggcaccaggaccatccatactcccagcctcaccagctacaaggcacagaatggaagttcaagcaaagccaccccatccacagcaaaagaaacctcttaaaggtcaaatcctattaggcacaagtcggagttacatttaaaaaaaattaacagtctacaacaactgttttcacaagagaatgtaacatattgctgtatcgtttgaggcttaatgctaaatatgtgctaaatactggattaatagatttcagtaaagctcgttcgttttgtttggttttctttttacctagttgctatagtgtctacagtctatactcaatacctataaaatgcagtaagcatgtgttacagaaagaggttctggtgggagagaaaggtgcgtgtgagacaggagaattgtcttaagcatataaaacatgtatgattccagaattttagtatgttttgtataaaactatttttcattacggagactagaagtgaacagagaattacacaagtgtgactatacaaattgtaaaacagatactataatatttccttttattttagtgttatttagctttattacagatttctatttttgtcaaaacttcatggttcctttcaagatcttttttgccaaaacattttgatactatagcattgtacatttgaaagtagtgttctagactataaaaccaatgaacttctacatgagccctacagacaggcatgtgtagaaggcaatttatcaaacctattgcactgccatgaaaagtgtgtataataatttgctagcccaagcaagctagttttctttgcttgcttcttttctttcttttttccttccttttttttttttttttcttttttaacatgttgagattctctagttgttttctttggcgtatctaaccccttcttttgttttctgagacctggtaacccacgctcttgcattgtggattttaaaatgtatactctgtacggttctgtaaaccgaaaaacttttgtaaatatataaatatacatagacataaaaatactgtatgtgacagcacatagagtagttttcccacaccaaagttaatttttatgcatgctttaaaagtatatatcgggaccggcagaaatggaagtatccatacatttttaaaaagcaacaagtttgcacagctagagtgtttttgtaaataaatgtatttgtataacacagtcatgtaatatacagaactataagcagagactttgcaaaactaaataaagggctgcatgcttattattttttgtaccttgtcactataactacttcctagtcaaagaacgaaatgtaactgttaccgagttaaatgtttttccgctttgagggatgtaaccacatccactcagaggacactacttttctgaaagctctggggtgactaatgatgagttcctaataaattaattgcaagtgtggtgccttggaaaaaaaaaaaaaaaaaaaaaaaaaaaaaaaaaaaaaaaaaaaaaaaaaaaaaaaaaaaaaaaa

SEQ ID NO: 55 - protein, 1744 aa, Homo sapiens
MEENESQKCEPCLPYSADRRQMQEQGKGNLHVTSPEDAECRRTKERLSNGNSRGSVSKSSRNIPRRHTLGGPRSSKEILGMQTSEMDRKREAFLEHLKQKYPHHASAIMGHQERLRDQTRSPKLSHSPQPPSLGDPVEHLSETSADSLEAMSEGDAPTPFSRGSRTRASLPVVRSTNQTKERSLGVLYLQYGDETKQLRMPNEITSADTIRALFVSAFPQQLTMKMLESPSVAIYIKDESRNVYYELNDVRNIQDRSLLKVYNKDPAHAFNHTPKTMNGDMRMQRELVYARGDGPGAPRPGSTAHPPHAIPNSPPSTPVPHSMPPSPSRIPYGGTRSMVVPGNATIPRDRISSLPVSRPISPSPSAILERRDVKPDEDMSGKNIAMYRNEGFYADPYLYHEGRMSIASSHGGHPLDVPDHIIAYHRTAIRSASAYCNPSMQAEMHMEQSLYRQKSRKYPDSHLPTLGSKTPPASPHRVSDLRMIDMHAHYNAHGPPHTMQPDRASPSRQAFKKEPGTLVYIEKPRSAAGLSSLVDLGPPLMEKQVFAYSTATIPKDRETRERMQAMEKQIASLTGLVQSALFKGPITSYSKDASSEKMMKTTANRNHTDSAGTPHVSGGKMLSALESTVPPSQPPPVGTSAIHMSLLEMRRSVAELRLQLQQMRQLQLQNQELLRAMMKKAELEISGKVMETMKRLEDPVQRQRVLVEQERQKYLHEEEKIVKKLCELEDFVEDLKKDSTAASRLVTLKDVEDGAFLLRQVGEAVATLKGEFPTLQNKMRAILRIEVEAVRFLKEEPHKLDSLLKRVRSMTDVLTMLRRHVTDGLLKGTDAAQAAQYMAMEKATAAEVLKSQEEAAHTSGQPFHSTGAPGDAKSEVVPLSGMMVRHAQSSPVVIQPSQHSVALLNPAQNLPHVASSPAVPQEATSTLQMSQAPQSPQIPMNGSAMQSLFIEEIHSVSAKNRAVSIEKAEKKWEEKRQNLDHYNGKEFEKLLEEAQANIMKSIPNLEMPPATGPLPRGDAPVDKVELSEDSPNSEQDLEKLGGKSPPPPPPPPRRSYLPGSGLTTTRSGDVVYTGRKENITAKASSEDAGPSPQTRATKYPAEEPASAWTPSPPPVTTSSSKDEEEEEEEGDKIMAELQAFQKCSFMDVNSNSHAEPSRADSHVKDTRSGATVPPKEKKNLEFFHEDVRKSDVEYENGPQMEFQKVTTGAVRPSDPPKWERGMENSISDASRTSEYKTEIIMKENSISNMSLLRDSRNYSQETVPKASFGFSGISPLEDEINKGSKISGLQYSIPDTENQTLNYGKTKEMEKQNTDKCHVSSHTRLTESSVHDFKTEDQEVITTDFGQVVLRPKEARHANVNPNEDGESSSSSPTEENAATDNIAFMITETTVQVLSSGEVHDIVSQKGEDIQTVNIDARKEMTPRQEGTDNEDPVVCLDKKPVIIIFDEPMDIRSAYKRLSTIFEECDEELERMMMEEKIEEEEEEENGDSVVQNNNTSQMSHKKVAPGNLRTGQQVETKSQPHSLATETRNPGGQEMNRTELNKFSHVDSPNSECKGEDATDDQFESPKKKFKFKFPKKQLAALTQAIRTGTKTGKKTLQVVVYEEEEEDGTLKQHKEAKRFEIARSQPEDTPENTVRRQEQPSIESTSPISRTDEIRKNTYRTLDSLEQTIKQLENTISEMSPKALVDTSCSSNRDSVASSSHIAQEASPRPLLVPDEGPTALEPPTSIPSASRKVSWSAGK

SEQ ID NO: 56 - DNA, 8362 bp, Homo sapiens
  CDS (1)..(5127)
atggaagaaaatgaaagccagaaatgtgagccgtgccttccttactcagcagacagaagacagatgcaggaacaaggcaaaggcaatctgcatgtaacatcaccagaagatgcagaatgccgcagaaccaaggaacgcctttctaatggaaacagtcgtggttcagtttccaagtcttcccgcaatatcccaaggagacacaccctaggggggccccgaagttccaaggaaatactgggaatgcaaacatctgagatggatcggaagagagaagcgttcctagaacatctgaagcagaagtacccccaccacgcctctgcaatcatgggtcaccaagagaggctgagagaccagacaaggagccccaaactgtctcacagtcctcaaccacccagtctgggtgacccggtcgagcatttatcagagacgtccgctgattctttggaagccatgtctgagggggatgctccaacccctttttccagaggcagccggactcgtgcgagccttcctgtggtgaggtcaaccaaccagacgaaagaaagatctctgggggttctctatctccagtatggagatgaaaccaagcagctcaggatgccgaatgaaatcacaagtgcagacacaatccgtgctctcttcgtaagtgcctttccacagcagctcaccatgaaaatgctggaatcgcccagtgtcgccatttacatcaaagatgaaagcagaaatgtctattatgaattaaatgatgtaaggaacattcaagacagatcactcctcaaagtgtacaacaaggatcctgcacatgcgtttaatcacacaccaaaaactatgaatggagacatgaggatgcagagagaacttgtttatgcaagaggagatggccctggggcccctcgccccggatctactgctcatccaccccatgcgattccaaattccccaccgtctactccagtgccccattccatgcccccctccccgtccagaattccttatgggggcacccgctccatggttgttcctggcaatgccaccatccccagggacagaatctccagcctgccagtctccagacccatctctccaagcccaagcgccattttagaaagaagagatgtcaagcctgatgaagacatgagtggcaaaaacattgcaatgtacagaaatgagggtttctatgctgatccttacctttatcacgagggacggatgagcatagcctcatcccatggtggacacccactggatgtccccgaccacatcattgcatatcaccgcaccgccatccggtcagcgagtgcttattgtaacccctcaatgcaagcggaaatgcatatggaacaatcactgtacagacagaaatcaaggaaatatccggatagccatttgcctacactgggctccaaaacaccccctgcctctcctcacagagtcagtgacctgaggatgatagacatgcacgctcactataatgcccacggcccccctcacaccatgcagccagaccgggcctctccgagccgccaggcctttaaaaaggagccaggcaccttggtgtatatagaaaagccacggagcgctgcaggattatccagccttgtagacctcggccctcctctaatggagaagcaagtttttgcctacagcacggcgacaatacccaaagacagagagaccagcgagaaaatgatgaaaaccacagccaacaggaaccacacagatagtgcaggaacgccccatgtgtctggtgggaagatgctcagtgctctggagtccacggtgcctcccagccagcctccacctgtgggcacctcagccatccacatgagcctgcttgagatgaggcggagcgtggcggaactcaggctccagctccagcagatgcggcagctccagctgcagaaccaggagttgctgagggcaatgatgaagaaggccgagctggaaatcagtggcaaagtgatggaaacaatgaagagactggaggatcccgtgcagcgacagcgcgtcctagtggagcaagagagacaaaaatatcttcatgaggaagagaagatcgtcaagaagttgtgcgagttggaagactttgttgaagacttgaagaaggactccacggcagccagccgattggttactctgaaagacgtggaagacggggctttcctcctgcgtcaagtgggagaggctgtagctaccctgaaaggagaatttccaaccttacaaaacaagatgcgagccatcctgcgcatagaagtggaggccgtgcggtttctgaaggaggagccacacaagctggacagtctcctgaagcgtgtgcgcagcatgacagacgtcctgaccatgctgcggagacatgtcactgatgggctcctgaaaggcacggacgcagcccaagccgcacagtacatggctatggaaaaggccacagccgcagaagtcctgaagagtcaggaggaggcagcccacacctccggccagcccttccacagcacaggtgcccctggcgatgcgaagtcggaagtggtgcctttgtccggcatgatggttcgccacgcgcagagctcccctgtggtcatccagccctcccagcactccgtggccctgctgaaccctgctcagaacttgcctcacgtggccagctccccagccgtcccccaggaagcaacctccactctgcagatgtcgcaggctccgcagtccccacagatacccatgaatgggtctgccatgcagagcttgttcattgaagaaatccacagtgtgagtgccaagaacagggcagtgtctatcgagaaagcagaaaagaaatgggaggaaaaaaggcaaaatctggatcactataatgggaaagagtttgagaagctcctagaagaagctcaggccaatatcatgaagtcaataccaaatctggagatgccgccagccacaggcccactgccaaggggagatgccccagtggacaaggtggaactttcagaagattctccaaattcggaacaggacttggaaaagctggggggaaagtcgccccctcctcctccgccacctcctcgtcgaagctacctgccaggatcgggactcaccaccacgaggtcaggcgatgtggtctacaccggcagaaaggagaacatcaccgctaaggcaagcagtgaagatgctggaccaagcccacagaccagagctacaaaatatccagcagaggagcctgcttcagcctggaccccatccccaccgcctgtcaccacctcctcctcaaaggatgaggaggaagaagaagaagaaggagacaaaataatggcagaactccaggcattccagaagtgttcctttatggatgtaaattcaaacagtcatgctgagccatcccgggctgacagtcacgttaaagacactaggtcgggcgccacagtgccacccaaggagaagaagaatttggaatttttccatgaagatgtacggaaatctgatgttgaatatgaaaatggcccccaaatggaattccaaaaggttaccacaggggctgtaagacctagtgaccctcctaagtgggaaagaggaatggagaatagtatttctgatgcatcaagaacatcagaatataaaactgagatcataatgaaggaaaattccatatccaatatgagtttactcagagacagtagaaactattcccaggaaactgtgcctaaggccagtttcggtttctctggcattagtccattagaagatgaaataaacaaagggtctaaaatctcaggcctgcaatactctatacctgacaccgagaaccagacgctgaattacggaaagacaaaggagatggaaaagcaaaatacggataagtgtcacgtttcctctcacactagactaacagaatcaagcgtgcatgattttaaaacagaagatcaagaggttatcacgacagattttggccaagttgttctaagacccaaggaggcaaggcatgctaacgtgaaccctaatgaggatggagaatcaagttcaagttctcccactgaagaaaatgcagccactgacaatattgccttcatgattaccgaaaccactgtccaggttctttccagtggggaggtgcatgatattgttagccaaaagggagaagacatacagacggttaatatcgatgccagaaaagagatgaccccccgacaagaagggactgacaatgaggatccagtcgtgtgcctggacaagaaaccagtgatcatcattttcgatgagcccatggacatccggtctgcctataagagactttcaactatctttgaggaatgtgatgaggaattagagagaatgatgatggaggaaaagatagaggaggaggaagaggaggaaaatggggattctgtagtccagaataataacacttcccagatgtctcataagaaggtggccccaggcaatcttagaaccggacaacaggtggaaacaaagtcacagccacactccctggccacagagaccagaaacccaggaggacaggaaatgaacagaacggagctgaacaagttcagccacgtggattctccaaattcggaatgcaagggtgaggacgcgaccgatgaccagtttgaaagccccaagaaaaagtttaaattcaaattccctaagaagcaactcgccgctctcactcaagccattcgcaccggaactaaaacagggaagaagactttgcaagtggtagtctatgaagaagaggaagaggatggcaccctgaaacagcacaaagaagccaagcgcttcgaaatcgctaggtctcaacctgaagacacccctgaaaacacagtgaggaggcaagagcagcccagcatcgagagtacatctccgatttcaagaactgatgaaattagaaaaaacacctacagaacattggatagcctggagcagaccattaaacagctcgaaaatacaatcagtgaaatgagtcccaaagccctagttgatacctcatgttcttccaacagagattctgttgcaagttcatcccacatagcccaagaggcctctccccgacccttgctagttccggatgaaggtcccactgccctagagccccctacgtcgataccttcagcttcacgtaaggtatcttggtctgctggaaaatgaaaagacccagctgctttcctaaatctgccataatcaccattagtgaaaggtgtcttgtaacttaattgctttctttcaggtggcttttttttttttgtctgttcgccatgaaacccttctttcatactttctccctcaccttccaaacaacaacaactaggtatctaacagctaatcagttctgtttttgcctctgttgctgactggtgttgggtaaacacgaggctgctgggtcagccatgtgctgttgaaatggttgctctgatactcacattaaaatccgtttgatcagtagtgagcagttgattctgtttgattcttctgattaaccccagttggtgtctcctagatctgtcctgcatgtagggctgtggcttctcaccttgagcttctctgcacatcgtggggcagcctcacagatgacctactcatgcgcttctccttctcttccccctctcactggtccttcccacagggctccagcggggccccacagacgagcaggatgcctgtccccatgagtgccaagaacagacccggaaccctggacaaacccggcaagcagtccaaactgcaggatccccgccaatatcgtcaggtagttttaccttaaacccacttttggatggacgctatttcagttaagcaagtcactgacttagtttataccaaatattgtgctttctttgtaagataacggtttacatagacatcctggatctgggggcatgaagaaagtctaaataaacctttgttacacttttttaccacgcttttgcatgcttgcaataaaacatcttttactttgtgactccaaactccaaattttaactgttaacacacggtgccagaccaggtggcttttctttggtgaatgtagtgtttcatctgaacacctcgggaagcagagacaaaccaacctgtggttgaactgcccttaacgtcaccactactaacgtctatgttgactgtattgtgttagaagcacattaacactccgtcacaatgcccgacccccaccccagtaattatccagacgcatggcccacctggcacacaggaaatggtagagctggaatgatgggactcctctcacaaatgtattcttcctttcctcctttcccgtccatcctttgctatgtacatggggggtttctaccaggtccagtagagcacaacaagacttagctcaggccttgaactgtgtttggttggttttctttgattgaattattctcagaagggctgtgttgccaggccctgtgggttgatcatgtgaccgcctttctgacaaaatgtctcccgccatctttatttgcaggctaatggaagtgctaagaaatctggtggggactttaagcctacttccccctccttacctgcttctaagattccagccctttctcccagctctgggaaaagcagttctctgccctcttctagtggtgacagctctaacctccctaatccacctgctactaaaccatcgattgcttctaaccctctcagcccccaaacaggaccacctgctcactctgcctccctcatcccttctgtctctaatggctctttgaagtttcagagcctcactcatacaggtaaaggtcaccatctttcattctcaccgcagagtcaaaatggccgagcaccccctcctttgtcattttcctcctcccctccttctcctgcctcctccgtctcactgaatcaaggtgccaagggcaccaggaccatccatactcccagcctcaccagctacaaggcacagaatggaagttcaagcaaagccaccccatccacagcaaaagaaacctcttaaaggtcaaatcctattaggcacaagtcggagttacatttaaaaaaaattaacagtctacaacaactgttttcacaagagaatgtaacatattgctgtatcgtttgaggcttaatgctaaatatgtgctaaatactggattaatagatttcagtaaagctcgttcgttttgtttggttttctttttacctagttgctatagtgtctacagtctatactcaatacctataaaatgcagtaagcatgtgttacagaaagaggttctggtgggagagaaaggtgcgtgtgagacaggagaattgtcttaagcatataaaacatgtatgattccagaattttagtatgttttgtataaaactatttttcattacggagactagaagtgaacagagaattacacaagtgtgactatacaaattgtaaaacagatactataatatttccttttattttagtgttatttagctttattacagatttctatttttgtcaaaacttcatggttcctttcaagatcttttttgccaaaacattttgatactatagcattgtacatttgaaagtagtgttctagactataaaaccaatgaacttctacatgagccctacagacaggcatgtgtagaaggcaatttatcaaacctattgcactgccatgaaaagtgtgtataataatttgctagcccaagcaagctagttttctttgcttgcttcttttctttcttttttccttccttttttttttttttttcttttttaacatgttgagattctctagttgttttctttggcgtatctaaccccttcttttgttttctgagacctggtaacccacgctcttgcattgtggattttaaaatgtatactctgtacggttctgtaaaccgaaaaacttttgtaaatatataaatatacatagacataaaaatactgtatgtgacagcacatagagtagttttcccacaccaaagttaatttttatgcatgctttaaaagtatatatcgggaccggcagaaatggaagtatccatacatttttaaaaagcaacaagtttgcacagctagagtgtttttgtaaataaatgtatttgtataacacagtcatgtaatatacagaactataagcagagactttgcaaaactaaataaagggctgcatgcttattattttttgtaccttgtcactataactacttcctagtcaaagaacgaaatgtaactgttaccgagttaaatgtttttccgctttgagggatgtaaccacatccactcagaggacactacttttctgaaagctctggggtgactaatgatgagttcctaataaattaattgcaagtgtggtgccttggaaaaaaaaaaaaaaaaaaaaaaaaaaaaaaaaaaaaaaaaaaaaaaaaaaaaaaaaaaaaaaaa

SEQ ID NO: 57 - protein, 1709 aa, Homo sapiens
MEENESQKCEPCLPYSADRRQMQEQGKGNLHVTSPEDAECRRTKERLSNGNSRGSVSKSSRNIPRRHTLGGPRSSKEILGMQTSEMDRKREAFLEHLKQKYPHHASAIMGHQERLRDQTRSPKLSHSPQPPSLGDPVEHLSETSADSLEAMSEGDAPTPFSRGSRTRASLPVVRSTNQTKERSLGVLYLQYGDETKQLRMPNEITSADTIRALFVSAFPQQLTMKMLESPSVAIYIKDESRNVYYELNDVRNIQDRSLLKVYNKDPAHAFNHTPKTMNGDMRMQRELVYARGDGPGAPRPGSTAHPPHAIPNSPPSTPVPHSMPPSPSRIPYGGTRSMVVPGNATIPRDRISSLPVSRPISPSPSAILERRDVKPDEDMSGKNIAMYRNEGFYADPYLYHEGRMSIASSHGGHPLDVPDHIIAYHRTAIRSASAYCNPSMQAEMHMEQSLYRQKSRKYPDSHLPTLGSKTPPASPHRVSDLRMIDMHAHYNAHGPPHTMQPDRASPSRQAFKKEPGTLVYIEKPRSAAGLSSLVDLGPPLMEKQVFAYSTATIPKDRETSEKMMKTTANRNHTDSAGTPHVSGGKMLSALESTVPPSQPPPVGTSAIHMSLLEMRRSVAELRLQLQQMRQLQLQNQELLRAMMKKAELEISGKVMETMKRLEDPVQRQRVLVEQERQKYLHEEEKIVKKLCELEDFVEDLKKDSTAASRLVTLKDVEDGAFLLRQVGEAVATLKGEFPTLQNKMRAILRIEVEAVRFLKEEPHKLDSLLKRVRSMTDVLTMLRRHVTDGLLKGTDAAQAAQYMAMEKATAAEVLKSQEEAAHTSGQPFHSTGAPGDAKSEVVPLSGMMVRHAQSSPVVIQPSQHSVALLNPAQNLPHVASSPAVPQEATSTLQMSQAPQSPQIPMNGSAMQSLFIEEIHSVSAKNRAVSIEKAEKKWEEKRQNLDHYNGKEFEKLLEEAQANIMKSIPNLEMPPATGPLPRGDAPVDKVELSEDSPNSEQDLEKLGGKSPPPPPPPPRRSYLPGSGLTTTRSGDVVYTGRKENITAKASSEDAGPSPQTRATKYPAEEPASAWTPSPPPVTTSSSKDEEEEEEEGDKIMAELQAFQKCSFMDVNSNSHAEPSRADSHVKDTRSGATVPPKEKKNLEFFHEDVRKSDVEYENGPQMEFQKVTTGAVRPSDPPKWERGMENSISDASRTSEYKTEIIMKENSISNMSLLRDSRNYSQETVPKASFGFSGISPLEDEINKGSKISGLQYSIPDTENQTLNYGKTKEMEKQNTDKCHVSSHTRLTESSVHDFKTEDQEVITTDFGQVVLRPKEARHANVNPNEDGESSSSSPTEENAATDNIAFMITETTVQVLSSGEVHDIVSQKGEDIQTVNIDARKEMTPRQEGTDNEDPVVCLDKKPVIIIFDEPMDIRSAYKRLSTIFEECDEELERMMMEEKIEEEEEEENGDSVVQNNNTSQMSHKKVAPGNLRTGQQVETKSQPHSLATETRNPGGQEMNRTELNKFSHVDSPNSECKGEDATDDQFESPKKKFKFKFPKKQLAALTQAIRTGTKTGKKTLQVVVYEEEEEDGTLKQHKEAKRFEIARSQPEDTPENTVRRQEQPSIESTSPISRTDEIRKNTYRTLDSLEQTIKQLENTISEMSPKALVDTSCSSNRDSVASSSHIAQEASPRPLLVPDEGPTALEPPTSIPSASRKVSWSAGK

SEQ ID NO: 58 - DNA, 7140 bp, Homo sapiens
  CDS (1)..(5724)
atggaagaaaatgaaagccagaaatgtgagccgtgccttccttactcagcagacagaagacagatgcaggaacaaggcaaaggcaatctgcatgtaacatcaccagaagatgcagaatgccgcagaaccaaggaacgcctttctaatggaaacagtcgtggttcagtttccaagtcttcccgcaatatcccaaggagacacaccctaggggggccccgaagttccaaggaaatactgggaatgcaaacatctgagatggatcggaagagagaagcgttcctagaacatctgaagcagaagtacccccaccacgcctctgcaatcatgggtcaccaagagaggctgagagaccagacaaggagccccaaactgtctcacagtcctcaaccacccagtctgggtgacccggtcgagcatttatcagagacgtccgctgattctttggaagccatgtctgagggggatgctccaacccctttttccagaggcagccggactcgtgcgagccttcctgtggtgaggtcaaccaaccagacgaaagaaagatctctgggggttctctatctccagtatggagatgaaaccaagcagctcaggatgccgaatgaaatcacaagtgcagacacaatccgtgctctcttcgtaagtgcctttccacagcagctcaccatgaaaatgctggaatcgcccagtgtcgccatttacatcaaagatgaaagcagaaatgtctattatgaattaaatgatgtaaggaacattcaagacagatcactcctcaaagtgtacaacaaggatcctgcacatgcgtttaatcacacaccaaaaactatgaatggagacatgaggatgcagagagaacttgtttatgcaagaggagatggccctggggcccctcgccccggatctactgctcatccaccccatgcgattccaaattccccaccgtctactccagtgccccattccatgcccccctccccgtccagaattccttatgggggcacccgctccatggttgttcctggcaatgccaccatccccagggacagaatctccagcctgccagtctccagacccatctctccaagcccaagcgccattttagaaagaagagatgtcaagcctgatgaagacatgagtggcaaaaacattgcaatgtacagaaatgagggtttctatgctgatccttacctttatcacgagggacggatgagcatagcctcatcccatggtggacacccactggatgtccccgaccacatcattgcatatcaccgcaccgccatccggtcagcgagtgcttattgtaacccctcaatgcaagcggaaatgcatatggaacaatcactgtacagacagaaatcaaggaaatatccggatagccatttgcctacactgggctccaaaacaccccctgcctctcctcacagagtcagtgacctgaggatgatagacatgcacgctcactataatgcccacggcccccctcacaccatgcagccagaccgggcctctccgagccgccaggcctttaaaaaggagccaggcaccttggtgtatatagaaaagccacggagcgctgcaggattatccagccttgtagacctcggccctcctctaatggagaagcaagtttttgcctacagcacggcgacaatacccaaagacagagagaccagcgagaaaatgatgaaaaccacagccaacaggaaccacacagatagtgcaggaacgccccatgtgtctggtgggaagatgctcagtgctctggagtccacggtgcctcccagccagcctccacctgtgggcacctcagccatccacatgagcctgcttgagatgaggcggagcgtggcggaactcaggctccagctccagcagatgcggcagctccagctgcagaaccaggagttgctgagggcaatgatgaagaaggccgagctggaaatcagtggcaaagtgatggaaacaatgaagagactggaggatcccgtgcagcgacagcgcgtcctagtggagcaagagagacaaaaatatcttcatgaggaagagaagatcgtcaagaagttgtgcgagttggaagactttgttgaagacttgaagaaggactccacggcagccagccgattggttactctgaaagacgtggaagacggggctttcctcctgcgtcaagtgggagaggctgtagctaccctgaaaggagaatttccaaccttacaaaacaagatgcgagccatcctgcgcatagaagtggaggccgtgcggtttctgaaggaggagccacacaagctggacagtctcctgaagcgtgtgcgcagcatgacagacgtcctgaccatgctgcggagacatgtcactgatgggctcctgaaaggcacggacgcagcccaagccgcacagtacatggctatggaaaaggccacagccgcagaagtcctgaagagtcaggaggaggcagcccacacctccggccagcccttccacagcacaggtgcccctggcgatgcgaagtcggaagtggtgcctttgtccggcatgatggttcgccacgcgcagagctcccctgtggtcatccagccctcccagcactccgtggccctgctgaaccctgctcagaacttgcctcacgtggccagctccccagccgtcccccaggaagcaacctccactctgcagatgtcgcaggctccgcagtccccacagatacccatgaatgggtctgccatgcagagcttgttcattgaagaaatccacagtgtgagtgccaagaacagggcagtgtctatcgagaaagcagaaaagaaatgggaggaaaaaaggcaaaatctggatcactataatgggaaagagtttgagaagctcctagaagaagctcaggccaatatcatgaagtcaataccaaatctggagatgccgccagccacaggcccactgccaaggggagatgccccagtggacaaggtggaactttcagaagattctccaaattcggaacaggacttggaaaagctggggggaaagtcgccccctcctcctccgccacctcctcgtcgaagctacctgccaggatcgggactcaccaccacgaggtcaggcgatgtggtctacaccggcagaaaggagaacatcaccgctaaggcaagcagtgaagatgctggaccaagcccacagaccagagctacaaaatatccagcagaggagcctgcttcagcctggaccccatccccaccgcctgtcaccacctcctcctcaaaggatgaggaggaagaagaagaagaaggagacaaaataatggcagaactccaggcattccagaagtgttcctttatggatgtaaattcaaacagtcatgctgagccatcccgggctgacagtcacgttaaagacactaggtcgggcgccacagtgccacccaaggagaagaagaatttggaatttttccatgaagatgtacggaaatctgatgttgaatatgaaaatggcccccaaatggaattccaaaaggttaccacaggggctgtaagacctagtgaccctcctaagtgggaaagaggaatggagaatagtatttctgatgcatcaagaacatcagaatataaaactgagatcataatgaaggaaaattccatatccaatatgagtttactcagagacagtagaaactattcccaggaaactgtgcctaaggccagtttcggtttctctggcattagtccattagaagatgaaataaacaaagggtctaaaatctcaggcctgcaatactctatacctgacaccgagaaccagacgctgaattacggaaagacaaaggagatggaaaagcaaaatacggataagtgtcacgtttcctctcacactagactaacagaatcaagcgtgcatgattttaaaacagaagatcaagaggttatcacgacagattttggccaagttgttctaagacccaaggaggcaaggcatgctaacgtgaaccctaatgaggatggagaatcaagttcaagttctcccactgaagaaaatgcagccactgacaatattgccttcatgattaccgaaaccactgtccaggttctttccagtggggaggtgcatgatattgttagccaaaagggagaagacatacagacggttaatatcgatgccagaaaagagatgaccccccgacaagaagggactgacaatgaggatccagtcgtgtgcctggacaagaaaccagtgatcatcattttcgatgagcccatggacatccggtctgcctataagagactttcaactatctttgaggaatgtgatgaggaattagagagaatgatgatggaggaaaagatagaggaggaggaagaggaggaaaatggggattctgtagtccagaataataacacttcccagatgtctcataagaaggtggccccaggcaatcttagaaccggacaacaggtggaaacaaagtcacagccacactccctggccacagagaccagaaacccaggaggacaggaaatgaacagaacggagctgaacaagttcagccacgtggattctccaaattcggaatgcaagggtgaggacgcgaccgatgaccagtttgaaagccccaagaaaaagtttaaattcaaattccctaagaagcaactcgccgctctcactcaagccattcgcaccggaactaaaacagggaagaagactttgcaagtggtagtctatgaagaagaggaagaggatggcaccctgaaacagcacaaagaagccaagcgcttcgaaatcgctaggtctcaacctgaagacacccctgaaaacacagtgaggaggcaagagcagcccagcatcgagagtacatctccgatttcaagaactgatgaaattagaaaaaacacctacagaacattggatagcctggagcagaccattaaacagctcgaaaatacaatcagtgaaatgagtcccaaagccctagttgatacctcatgttcttccaacagagattctgttgcaagttcatcccacatagcccaagaggcctctccccgacccttgctagttccggatgaaggtcccactgccctagagccccctacgtcgataccttcagcttcacgtaagggctccagcggggccccacagacgagcaggatgcctgtccccatgagtgccaagaacagacccggaaccctggacaaacccggcaagcagtccaaactgcaggatccccgccaatatcgtcaggctaatggaagtgctaagaaatctggtggggactttaagcctacttccccctccttacctgcttctaagattccagccctttctcccagctctgggaaaagcagttctctgccctcttctagtggtgacagctctaacctccctaatccacctgctactaaaccatcgattgcttctaaccctctcagcccccaaacaggaccacctgctcactctgcctccctcatcccttctgtctctaatggctctttgaagtttcagagcctcactcatacaggtaaaggtcaccatctttcattctcaccgcagagtcaaaatggccgagcaccccctcctttgtcattttcctcctcccctccttctcctgcctcctccgtctcactgaatcaaggtgccaagggcaccaggaccatccatactcccagcctcaccagctacaaggcacagaatggaagttcaagcaaagccaccccatccacagcaaaagaaacctcttaaaggtcaaatcctattaggcacaagtcggagttacatttaaaaaaaattaacagtctacaacaactgttttcacaagagaatgtaacatattgctgtatcgtttgaggcttaatgctaaatatgtgctaaatactggattaatagatttcagtaaagctcgttcgttttgtttggttttctttttacctagttgctatagtgtctacagtctatactcaatacctataaaatgcagtaagcatgtgttacagaaagaggttctggtgggagagaaaggtgcgtgtgagacaggagaattgtcttaagcatataaaacatgtatgattccagaattttagtatgttttgtataaaactatttttcattacggagactagaagtgaacagagaattacacaagtgtgactatacaaattgtaaaacagatactataatatttccttttattttagtgttatttagctttattacagatttctatttttgtcaaaacttcatggttcctttcaagatcttttttgccaaaacattttgatactatagcattgtacatttgaaagtagtgttctagactataaaaccaatgaacttctacatgagccctacagacaggcatgtgtagaaggcaatttatcaaacctattgcactgccatgaaaagtgtgtataataatttgctagcccaagcaagctagttttctttgcttgcttcttttctttcttttttccttccttttttttttttttttcttttttaacatgttgagattctctagttgttttctttggcgtatctaaccccttcttttgttttctgagacctggtaacccacgctcttgcattgtggattttaaaatgtatactctgtacggttctgtaaaccgaaaaacttttgtaaatatataaatatacatagacataaaaatactgtatgtgacagcacatagagtagttttcccacaccaaagttaatttttatgcatgctttaaaagtatatatcgggaccggcagaaatggaagtatccatacatttttaaaaagcaacaagtttgcacagctagagtgtttttgtaaataaatgtatttgtataacacagtcatgtaatatacagaactataagcagagactttgcaaaactaaataaagggctgcatgcttattattttttgtaccttgtcactataactacttcctagtcaaagaacgaaatgtaactgttaccgagttaaatgtttttccgctttgagggatgtaaccacatccactcagaggacactacttttctgaaagctctggggtgactaatgatgagttcctaataaattaattgcaagtgtggtgccttggaaaaaaaaaaaaaaaaaaaaaaaaaaaaaaaaaaaaaaaaaaaaaaaaaaaaaaaaaaaaaaaa

SEQ ID NO: 59 - protein, 1908 aa, Homo sapiens
MEENESQKCEPCLPYSADRRQMQEQGKGNLHVTSPEDAECRRTKERLSNGNSRGSVSKSSRNIPRRHTLGGPRSSKEILGMQTSEMDRKREAFLEHLKQKYPHHASAIMGHQERLRDQTRSPKLSHSPQPPSLGDPVEHLSETSADSLEAMSEGDAPTPFSRGSRTRASLPVVRSTNQTKERSLGVLYLQYGDETKQLRMPNEITSADTIRALFVSAFPQQLTMKMLESPSVAIYIKDESRNVYYELNDVRNIQDRSLLKVYNKDPAHAFNHTPKTMNGDMRMQRELVYARGDGPGAPRPGSTAHPPHAIPNSPPSTPVPHSMPPSPSRIPYGGTRSMVVPGNATIPRDRISSLPVSRPISPSPSAILERRDVKPDEDMSGKNIAMYRNEGFYADPYLYHEGRMSIASSHGGHPLDVPDHIIAYHRTAIRSASAYCNPSMQAEMHMEQSLYRQKSRKYPDSHLPTLGSKTPPASPHRVSDLRMIDMHAHYNAHGPPHTMQPDRASPSRQAFKKEPGTLVYIEKPRSAAGLSSLVDLGPPLMEKQVFAYSTATIPKDRETSEKMMKTTANRNHTDSAGTPHVSGGKMLSALESTVPPSQPPPVGTSAIHMSLLEMRRSVAELRLQLQQMRQLQLQNQELLRAMMKKAELEISGKVMETMKRLEDPVQRQRVLVEQERQKYLHEEEKIVKKLCELEDFVEDLKKDSTAASRLVTLKDVEDGAFLLRQVGEAVATLKGEFPTLQNKMRAILRIEVEAVRFLKEEPHKLDSLLKRVRSMTDVLTMLRRHVTDGLLKGTDAAQAAQYMAMEKATAAEVLKSQEEAAHTSGQPFHSTGAPGDAKSEVVPLSGMMVRHAQSSPVVIQPSQHSVALLNPAQNLPHVASSPAVPQEATSTLQMSQAPQSPQIPMNGSAMQSLFIEEIHSVSAKNRAVSIEKAEKKWEEKRQNLDHYNGKEFEKLLEEAQANIMKSIPNLEMPPATGPLPRGDAPVDKVELSEDSPNSEQDLEKLGGKSPPPPPPPPRRSYLPGSGLTTTRSGDVVYTGRKENITAKASSEDAGPSPQTRATKYPAEEPASAWTPSPPPVTTSSSKDEEEEEEEGDKIMAELQAFQKCSFMDVNSNSHAEPSRADSHVKDTRSGATVPPKEKKNLEFFHEDVRKSDVEYENGPQMEFQKVTTGAVRPSDPPKWERGMENSISDASRTSEYKTEIIMKENSISNMSLLRDSRNYSQETVPKASFGFSGISPLEDEINKGSKISGLQYSIPDTENQTLNYGKTKEMEKQNTDKCHVSSHTRLTESSVHDFKTEDQEVITTDFGQVVLRPKEARHANVNPNEDGESSSSSPTEENAATDNIAFMITETTVQVLSSGEVHDIVSQKGEDIQTVNIDARKEMTPRQEGTDNEDPVVCLDKKPVIIIFDEPMDIRSAYKRLSTIFEECDEELERMMMEEKIEEEEEEENGDSVVQNNNTSQMSHKKVAPGNLRTGQQVETKSQPHSLATETRNPGGQEMNRTELNKFSHVDSPNSECKGEDATDDQFESPKKKFKFKFPKKQLAALTQAIRTGTKTGKKTLQVVVYEEEEEDGTLKQHKEAKRFEIARSQPEDTPENTVRRQEQPSIESTSPISRTDEIRKNTYRTLDSLEQTIKQLENTISEMSPKALVDTSCSSNRDSVASSSHIAQEASPRPLLVPDEGPTALEPPTSIPSASRKGSSGAPQTSRMPVPMSAKNRPGTLDKPGKQSKLQDPRQYRQANGSAKKSGGDFKPTSPSLPASKIPALSPSSGKSSSLPSSSGDSSNLPNPPATKPSIASNPLSPQTGPPAHSASLIPSVSNGSLKFQSLTHTGKGHHLSFSPQSQNGRAPPPLSFSSSPPSPASSVSLNQGAKGTRTIHTPSLTSYKAQNGSSSKATPSTAKETS

SEQ ID NO: 60 - DNA, 5343 bp, Homo sapiens
  CDS (1)..(3927)
atggaagaaaatgaaagccagaaatgtgagccgtgccttccttactcagcagacagaagacagatgcaggaacaaggcaaaggcaatctgcatgtaacatcaccagaagatgcagaatgccgcagaaccaaggaacgcctttctaatggaaacagtcgtggttcagtttccaagtcttcccgcaatatcccaaggagacacaccctaggggggccccgaagttccaaggaaatactgggaatgcaaacatctgagatggatcggaagagagaagcgttcctagaacatctgaagcagaagtacccccaccacgcctctgcaatcatgggtcaccaagagaggctgagagaccagacaaggagccccaaactgtctcacagtcctcaaccacccagtctgggtgacccggtcgagcatttatcagagacgtccgctgattctttggaagccatgtctgagggggatgctccaacccctttttccagaggcagccggactcgtgcgagccttcctgtggtgaggtcaaccaaccagacgaaagaaagatctctgggggttctctatctccagtatggagatgaaaccaagcagctcaggatgccgaatgaaatcacaagtgcagacacaatccgtgctctcttcgtaagtgcctttccacagcagctcaccatgaaaatgctggaatcgcccagtgtcgccatttacatcaaagatgaaagcagaaatgtctattatgaattaaatgatgtaaggaacattcaagacagatcactcctcaaagtgtacaacaaggatcctgcacatgcgtttaatcacacaccaaaaactatgaatggagacatgaggatgcagagagaacttgtttatgcaagaggagatggccctggggcccctcgccccggatctactgctcatccaccccatgcgattccaaattccccaccgtctactccagtgccccattccatgcccccctccccgtccagaattccttatgggggcacccgctccatggttgttcctggcaatgccaccatccccagggacagaatctccagcctgccagtctccagacccatctctccaagcccaagcgccattttagaaagaagagatgtcaagcctgatgaagacatgagtggcaaaaacattgcaatgtacagaaatgagggtttctatgctgatccttacctttatcacgagggacggatgagcatagcctcatcccatggtggacacccactggatgtccccgaccacatcattgcatatcaccgcaccgccatccggtcagcgagtgcttattgtaacccctcaatgcaagcggaaatgcatatggaacaatcactgtacagacagaaatcaaggaaatatccggatagccatttgcctacactgggctccaaaacaccccctgcctctcctcacagagtcagtgacctgaggatgatagacatgcacgctcactataatgcccacggcccccctcacaccatgcagccagaccgggcctctccgagccgccaggcctttaaaaaggagccaggcaccttggtgtatatagaaaagccacggagcgctgcaggattatccagccttgtagacctcggccctcctctaatggagaagcaagtttttgcctacagcacggcgacaatacccaaagacagagagaccagcgagaaaatgatgaaaaccacagccaacaggaaccacacagatagtgcaggaacgccccatgtgtctggtgggaagatgctcagtgctctggagtccacggtgcctcccagccagcctccacctgtgggcacctcagccatccacatgagcctgcttgagatgaggcggagcgtggcggaactcaggctccagctccagcagatgcggcagctccagctgcagaaccaggagttgctgagggcaatgatgaagaaggccgagctggaaatcagtggcaaagtgatggaaacaatgaagagactggaggatcccgtgcagcgacagcgcgtcctagtggagcaagagagacaaaaatatcttcatgaggaagagaagatcgtcaagaagttgtgcgagttggaagactttgttgaagacttgaagaaggactccacggcagccagccgattggttactctgaaagacgtggaagacggggctttcctcctgcgtcaagtgggagaggctgtagctaccctgaaaggagaatttccaaccttacaaaacaagatgcgagccatcctgcgcatagaagtggaggccgtgcggtttctgaaggaggagccacacaagctggacagtctcctgaagcgtgtgcgcagcatgacagacgtcctgaccatgctgcggagacatgtcactgatgggctcctgaaaggcacggacgcagcccaagccgcacagtacatggctatggaaaaggccacagccgcagaagtcctgaagagtcaggaggaggcagcccacacctccggccagcccttccacagcacaggtgcccctggcgatgcgaagtcggaagtggtgcctttgtccggcatgatggttcgccacgcgcagagctcccctgtggtcatccagccctcccagcactccgtggccctgctgaaccctgctcagaacttgcctcacgtggccagctccccagccgtcccccaggaagcaacctccactctgcagatgtcgcaggctccgcagtccccacagatacccatgaatgggtctgccatgcagagcttgttcattgaagaaatccacagtgtgagtgccaagaacagggcagtgtctatcgagaaagcagaaaagaaatgggaggaaaaaaggcaaaatctggatcactataatgggaaagagtttgagaagctcctagaagaagctcaggccaatatcatgaagtcaataccaaatctggagatgccgccagccacaggcccactgccaaggggagatgccccagtggacaaggtggaactttcagaagattctccaaattcggaacaggacttggaaaagctggggggaaagtcgccccctcctcctccgccacctcctcgtcgaagctacctgccaggatcgggactcaccaccacgaggtcaggcgatgtggtctacaccggcagaaaggagaacatcaccgctaaggcaagcagtgaagatgctggaccaagcccacagaccagagctacaaaatatccagcagaggagcctgcttcagcctggaccccatccccaccgcctgtcaccacctcctcctcaaaggatgaggaggaagaagaagaagaaggagacaaaataatggcagaactccagggctccagcggggccccacagacgagcaggatgcctgtccccatgagtgccaagaacagacccggaaccctggacaaacccggcaagcagtccaaactgcaggatccccgccaatatcgtcaggctaatggaagtgctaagaaatctggtggggactttaagcctacttccccctccttacctgcttctaagattccagccctttctcccagctctgggaaaagcagttctctgccctcttctagtggtgacagctctaacctccctaatccacctgctactaaaccatcgattgcttctaaccctctcagcccccaaacaggaccacctgctcactctgcctccctcatcccttctgtctctaatggctctttgaagtttcagagcctcactcatacaggtaaaggtcaccatctttcattctcaccgcagagtcaaaatggccgagcaccccctcctttgtcattttcctcctcccctccttctcctgcctcctccgtctcactgaatcaaggtgccaagggcaccaggaccatccatactcccagcctcaccagctacaaggcacagaatggaagttcaagcaaagccaccccatccacagcaaaagaaacctcttaaaggtcaaatcctattaggcacaagtcggagttacatttaaaaaaaattaacagtctacaacaactgttttcacaagagaatgtaacatattgctgtatcgtttgaggcttaatgctaaatatgtgctaaatactggattaatagatttcagtaaagctcgttcgttttgtttggttttctttttacctagttgctatagtgtctacagtctatactcaatacctataaaatgcagtaagcatgtgttacagaaagaggttctggtgggagagaaaggtgcgtgtgagacaggagaattgtcttaagcatataaaacatgtatgattccagaattttagtatgttttgtataaaactatttttcattacggagactagaagtgaacagagaattacacaagtgtgactatacaaattgtaaaacagatactataatatttccttttattttagtgttatttagctttattacagatttctatttttgtcaaaacttcatggttcctttcaagatcttttttgccaaaacattttgatactatagcattgtacatttgaaagtagtgttctagactataaaaccaatgaacttctacatgagccctacagacaggcatgtgtagaaggcaatttatcaaacctattgcactgccatgaaaagtgtgtataataatttgctagcccaagcaagctagttttctttgcttgcttcttttctttcttttttccttccttttttttttttttttcttttttaacatgttgagattctctagttgttttctttggcgtatctaaccccttcttttgttttctgagacctggtaacccacgctcttgcattgtggattttaaaatgtatactctgtacggttctgtaaaccgaaaaacttttgtaaatatataaatatacatagacataaaaatactgtatgtgacagcacatagagtagttttcccacaccaaagttaatttttatgcatgctttaaaagtatatatcgggaccggcagaaatggaagtatccatacatttttaaaaagcaacaagtttgcacagctagagtgtttttgtaaataaatgtatttgtataacacagtcatgtaatatacagaactataagcagagactttgcaaaactaaataaagggctgcatgcttattattttttgtaccttgtcactataactacttcctagtcaaagaacgaaatgtaactgttaccgagttaaatgtttttccgctttgagggatgtaaccacatccactcagaggacactacttttctgaaagctctggggtgactaatgatgagttcctaataaattaattgcaagtgtggtgccttggaaaaaaaaaaaaaaaaaaaaaaaaaaaaaaaaaaaaaaaaaaaaaaaaaaaaaaaaaaaaaaaa

SEQ ID NO: 61 - protein, 1309 aa, Homo sapiens
MEENESQKCEPCLPYSADRRQMQEQGKGNLHVTSPEDAECRRTKERLSNGNSRGSVSKSSRNIPRRHTLGGPRSSKEILGMQTSEMDRKREAFLEHLKQKYPHHASAIMGHQERLRDQTRSPKLSHSPQPPSLGDPVEHLSETSADSLEAMSEGDAPTPFSRGSRTRASLPVVRSTNQTKERSLGVLYLQYGDETKQLRMPNEITSADTIRALFVSAFPQQLTMKMLESPSVAIYIKDESRNVYYELNDVRNIQDRSLLKVYNKDPAHAFNHTPKTMNGDMRMQRELVYARGDGPGAPRPGSTAHPPHAIPNSPPSTPVPHSMPPSPSRIPYGGTRSMVVPGNATIPRDRISSLPVSRPISPSPSAILERRDVKPDEDMSGKNIAMYRNEGFYADPYLYHEGRMSIASSHGGHPLDVPDHIIAYHRTAIRSASAYCNPSMQAEMHMEQSLYRQKSRKYPDSHLPTLGSKTPPASPHRVSDLRMIDMHAHYNAHGPPHTMQPDRASPSRQAFKKEPGTLVYIEKPRSAAGLSSLVDLGPPLMEKQVFAYSTATIPKDRETSEKMMKTTANRNHTDSAGTPHVSGGKMLSALESTVPPSQPPPVGTSAIHMSLLEMRRSVAELRLQLQQMRQLQLQNQELLRAMMKKAELEISGKVMETMKRLEDPVQRQRVLVEQERQKYLHEEEKIVKKLCELEDFVEDLKKDSTAASRLVTLKDVEDGAFLLRQVGEAVATLKGEFPTLQNKMRAILRIEVEAVRFLKEEPHKLDSLLKRVRSMTDVLTMLRRHVTDGLLKGTDAAQAAQYMAMEKATAAEVLKSQEEAAHTSGQPFHSTGAPGDAKSEVVPLSGMMVRHAQSSPVVIQPSQHSVALLNPAQNLPHVASSPAVPQEATSTLQMSQAPQSPQIPMNGSAMQSLFIEEIHSVSAKNRAVSIEKAEKKWEEKRQNLDHYNGKEFEKLLEEAQANIMKSIPNLEMPPATGPLPRGDAPVDKVELSEDSPNSEQDLEKLGGKSPPPPPPPPRRSYLPGSGLTTTRSGDVVYTGRKENITAKASSEDAGPSPQTRATKYPAEEPASAWTPSPPPVTTSSSKDEEEEEEEGDKIMAELQGSSGAPQTSRMPVPMSAKNRPGTLDKPGKQSKLQDPRQYRQANGSAKKSGGDFKPTSPSLPASKIPALSPSSGKSSSLPSSSGDSSNLPNPPATKPSIASNPLSPQTGPPAHSASLIPSVSNGSLKFQSLTHTGKGHHLSFSPQSQNGRAPPPLSFSSSPPSPASSVSLNQGAKGTRTIHTPSLTSYKAQNGSSSKATPSTAKETS

SEQ ID NO: 62 - DNA, 5196 bp, Homo sapiens
  CDS (12)..(4790)
gtgagaggaagatggcggccgcggctgtggtggttcccgcagagtggataaagaactgggagaaatcagggagaggcgaatttttgcatttatgtcggatcctcagtgaaaataaaagccatgatagttcaacatacagagatttccagcaagctctctatgagttgtcatatcatgtaattaaaggaaatctaaagcatgaacaggcatctaatgttcttagtgacattagtgaatttcgtgaggatatgccctccattcttgctgatgtattctgcatattagacattgagacaaattgtttagaagaaaaaagcaagagagactattttacacagttggtattagcatgtttgtatttagtttcagacacagttctaaaggaacgcctggatccagaaacactggaatcattagggcttatcaaacaatcacagcaattcaatcaaaagtcagttaaaatcaagacaaaactcttttataagcagcaaaaattcaatttgttaagagaagagaatgaaggttatgccaagctgattgctgaattggggcaagatttatctggaagtattactagtgatttaatcttagaaaatatcaaatctttaataggatgctttaatctggatcccaatagagttttggatgtcattttagaagtgtttgaatgcaggccagaacacgatgacttctttatatctttgttagaatcttacatgagtatgtgtgaaccgcaaacactgtgtcatattcttgggttcaaattcaagttttaccaggaaccaaatggcgagacaccatcatctttatacagagttgcagcagtacttctacaatttaatcttattgatttagatgatctttatgtacatcttcttccggctgataattgcattatggatgaacacaaacgagaaattgcggaagctaagcaaattgttagaaagcttacgatggttgtgttgtcttctgaaaaaatggatgagcgagagaaagaaaaggaaaaagaagaggagaaagtagagaaaccacctgataaccaaaaacttggcttgttggaagccttattaaagattggtgattggcaacatgcacagaacattatggatcagatgcctccatactatgcagcttcacacaagctaatagcccttgctatttgcaagctcattcatataactattgagcctctctaccgaagagttggagttcctaaaggtgctaaaggctcacctgttaatgctttgcaaaacaagagagcaccaaaacaagctgagagctttgaagatttgaggagagacgtgttcaatatgttctgttaccttggtcctcacctttctcacgatcccattttatttgcaaaagtggtgcgcataggcaagtcatttatgaaggagtttcagtctgatggaagcaaacaagaagataaagaaaaaacggaagttatccttagctgtttgcttagcattactgaccaggtactacttccatctctttctttgatggactgcaatgcttgtatgtctgaggaactatggggaatgtttaaaacatttccatatcagcatagatatcgtctgtatggccagtggaagaatgaaacttataacagtcacccacttttagtaaaagttaaagctcaaacaatagacagagccaaatatatcatgaagcgcctaaccaaggaaaatgtgaagccttctggaagacaaattgggaagttgagccacagcaatccaaccattttgtttgattatatcttgtcacaaatacagaagtatgataacttaataacacctgtagtagattcattgaaatacctcacttcactgaattatgatgtcttggcctattgtatcattgaagctttagctaatccagaaaaggaaagaatgaaacatgatgacacaaccatctcaagctggcttcagagtctggctagtttctgtggtgcagtttttcgtaaatatccaattgatcttgctggtcttcttcagtatgttgccaatcagctaaaggcgggcaaaagttttgacctgcttatattgaaagaagtggtacaaaaaatggcaggaatagaaattacagaggaaatgacaatggagcaactagaggctatgactggtggagagcagctaaaagctgagggtggttattttggtcagatcagaaacactaaaaaatcctctcagagattaaaggatgctctattggaccatgatcttgcccttcctctctgtctgcttatggctcagcagagaaatggggtaatctttcaggaaggtggagagaaacatttgaaacttgtgggaaagctctatgaccagtgtcatgataccctggtgcagtttggtgggtttttagcatctaatctgagcacagaagattatataaagcgagtgccttcaattgatgtactctgtaatgaatttcatacaccccatgatgcagcatttttcctgtctaggccaatgtatgcccatcatatttcgtcaaagtatgatgaacttaaaaaatcagaaaagggaagtaaacagcaacataaagttcataagtacattacatcatgtgagatggtgatggcgcctgtccatgaagcagtggtctccttacatgtttccaaagtctgggatgacatcagccctcaattctatgctacattctggtcattgacaatgtatgaccttgcagttccacacaccagctatgaacgagaagtcaataaacttaaagtccagatgaaagcaattgatgacaatcaggaaatgcccccaaataaaaagaaaaaagagaaggagcgctgtactgcccttcaggacaagcttcttgaagaagaaaagaaacagatggaacatgtacagagagttctacagagattgaaactggaaaaggacaactggcttttagcaaaatctaccaaaaatgagaccatcacaaaatttctacagctgtgtatatttcctcgatgtattttttcagcaattgatgctgtttactgtgctcgttttgttgaattggtacatcaacagaaaactccaaatttttccacacttctttgctatgatcgagttttctctgacataatttacacagttgcaagctgtactgaaaatgaagccagtcgatacggaaggtttctttgctgcatgttagagactgtgaccaggtggcatagtgatagagccacatatgaaaaggaatgtggaaactatccaggattccttaccatattacgggcaactggatttgatggtggaaataaggctgatcaattagactatgaaaattttcgacatgttgtacataaatggcattacaaactaaccaaggcatcggtacattgccttgaaacaggcgaatatactcacatcaggaatatcttgattgtgctaacaaaaatacttccttggtacccaaaagttttgaatctgggtcaagctttggaaagaagagtacacaaaatctgccaagaagaaaaagagaagaggccagatctatatgcattggctatgggctactctgggcagttgaaaagtagaaagtcatacatgatacctgaaaatgagtttcatcacaaagacccccctccgaggaatgcagttgccagtgtgcaaaatgggcctggtggtgggccttcttcatcatcaataggaagtgcatctaaatcggatgaaagcagtactgaggagactgataaatcaagggagagatctcagtgtggtgtgaaagctgttaataaagcttctagtaccacacctaaagggaattcaagcaatggaaatagtggctctaacagcaacaaagctgttaaagaaaatgacaaagaaaaagggaaagagaaagaaaaagagaaaaaagaaaagactccagctactactccagaggccagggtacttggtaaagatggtaaagaaaaaccaaaggaagagcggccaaataaagatgaaaaagcaagagagaccaaggaaagaacgccgaagtctgacaaagagaaagaaaaattcaagaaggaagaaaaagctaaagatgagaaatttaagaccactgtccccaacgcagaatcaaaatcaactcaagaaagggaaagagagaaggagccatccagagaaagagatatagcaaaggaaatgaaatcaaaggaaaatgttaaaggaggagaaaaaacaccagtttctgggtccttgaaatcacctgttcccagatcagatattccagagcctgaaagggaacaaaaacgccgcaaaattgatactcacccttctccatcacattcctccacagtaaaggacagtctcatcgaactcaaggaatcttcagcaaagctctacattaatcatactcctccaccactgtccaagagtaaggagagagaaatggacaagaaagatttggacaagtcaagggaaagatccagagaaagagagaaaaaagatgaaaaggacaggaaagagcggaaaagggatcactcaaacaacgaccgtgaagtgccaccggacttaaccaagagacgtaaagaggagaatggaacaatgggggtttcaaaacataaaagtgaaagtccttgtgaatctccttatccaaatgagaaagacaaggaaaaaaataagtcaaaatcttcaggcaaagaaaaaggcagtgattcatttaaatctgagaagatggataaaatctcctccggtggcaaaaaggagtccaggcatgataaagaaaagatagaaaagaaagagaaacgggacagttcaggaggaaaggaagagaagaaacatcataagtcctcggacaagcacagataatgaagactttccatcaaggtgagatcggactggaactgttcggctgcgaccagaaatttattttcctgagtaaattgccgagaattaagaatgaagagggccatttgcatctccttaaattattcagttacctgctttattgctccatgtggaaaacttaaaattgttaagttgtgcattactgtattttaacttgttgcttagtttctacatgtttattttcagtaatggctgaaagtgttaactgttccatacttttagcacaatgtgctgcataaggttacctgtgtacagagttttactttagattaactaaatattgcctgggttcagtttttatttccattctgaaatgcttcctttttattgtttgaaactgaaaataaacaattgttgaaccctt

SEQ ID NO: 63 - protein, 1593 aa, Homo sapiens
MAAAAVVVPAEWIKNWEKSGRGEFLHLCRILSENKSHDSSTYRDFQQALYELSYHVIKGNLKHEQASNVLSDISEFREDMPSILADVFCILDIETNCLEEKSKRDYFTQLVLACLYLVSDTVLKERLDPETLESLGLIKQSQQFNQKSVKIKTKLFYKQQKFNLLREENEGYAKLIAELGQDLSGSITSDLILENIKSLIGCFNLDPNRVLDVILEVFECRPEHDDFFISLLESYMSMCEPQTLCHILGFKFKFYQEPNGETPSSLYRVAAVLLQFNLIDLDDLYVHLLPADNCIMDEHKREIAEAKQIVRKLTMVVLSSEKMDEREKEKEKEEEKVEKPPDNQKLGLLEALLKIGDWQHAQNIMDQMPPYYAASHKLIALAICKLIHITIEPLYRRVGVPKGAKGSPVNALQNKRAPKQAESFEDLRRDVFNMFCYLGPHLSHDPILFAKVVRIGKSFMKEFQSDGSKQEDKEKTEVILSCLLSITDQVLLPSLSLMDCNACMSEELWGMFKTFPYQHRYRLYGQWKNETYNSHPLLVKVKAQTIDRAKYIMKRLTKENVKPSGRQIGKLSHSNPTILFDYILSQIQKYDNLITPVVDSLKYLTSLNYDVLAYCIIEALANPEKERMKHDDTTISSWLQSLASFCGAVFRKYPIDLAGLLQYVANQLKAGKSFDLLILKEVVQKMAGIEITEEMTMEQLEAMTGGEQLKAEGGYFGQIRNTKKSSQRLKDALLDHDLALPLCLLMAQQRNGVIFQEGGEKHLKLVGKLYDQCHDTLVQFGGFLASNLSTEDYIKRVPSIDVLCNEFHTPHDAAFFLSRPMYAHHISSKYDELKKSEKGSKQQHKVHKYITSCEMVMAPVHEAVVSLHVSKVWDDISPQFYATFWSLTMYDLAVPHTSYEREVNKLKVQMKAIDDNQEMPPNKKKKEKERCTALQDKLLEEEKKQMEHVQRVLQRLKLEKDNWLLAKSTKNETITKFLQLCIFPRCIFSAIDAVYCARFVELVHQQKTPNFSTLLCYDRVFSDIIYTVASCTENEASRYGRFLCCMLETVTRWHSDRATYEKECGNYPGFLTILRATGFDGGNKADQLDYENFRHVVHKWHYKLTKASVHCLETGEYTHIRNILIVLTKILPWYPKVLNLGQALERRVHKICQEEKEKRPDLYALAMGYSGQLKSRKSYMIPENEFHHKDPPPRNAVASVQNGPGGGPSSSSIGSASKSDESSTEETDKSRERSQCGVKAVNKASSTTPKGNSSNGNSGSNSNKAVKENDKEKGKEKEKEKKEKTPATTPEARVLGKDGKEKPKEERPNKDEKARETKERTPKSDKEKEKFKKEEKAKDEKFKTTVPNAESKSTQEREREKEPSRERDIAKEMKSKENVKGGEKTPVSGSLKSPVPRSDIPEPEREQKRRKIDTHPSPSHSSTVKDSLIELKESSAKLYINHTPPPLSKSKEREMDKKDLDKSRERSREREKKDEKDRKERKRDHSNNDREVPPDLTKRRKEENGTMGVSKHKSESPCESPYPNEKDKEKNKSKSSGKEKGSDSFKSEKMDKISSGGKKESRHDKEKIEKKEKRDSSGGKEEKKHHKSSDKHR

SEQ ID NO: 64 - DNA, 2561 bp, Homo sapiens
  CDS (918)..(1253)
gttttctgttcctgtgttagtttgctgagaatgatggcttccagcttcatccatgtccctacaaaggacatgaactcatccttttttatgggtgcatagtattccatggtgtatatgtgccacattttctttatccggtctatcattggtgagcatttgggttggttccaagtctttggtattgtaaatagtgctgcagtaaacatatgtgtgcatgtgtctttatggtagaatgatttataatgctttgggtatatacccagtaatgggattgctgggtcaaatggtatttctggtactggatccttgaggaatcgccacactgtcttccacaatggttgaactaatttacactcccaccaacagtgtaaaagtgttcctatttctccacagcctggctaacatggcgaggccccgtctctgctaaaaatgcaaaaattagctgggcgtggtggcggatgcctgtagtcccagctactcgggcagctgatgaggcttgaacctgggaggtggaggttgcagtgagccgagatcgcaccattgcactccagcctgggtgacaagtgtgaaactgtgtctcaaaaataaataaataaataaaaataaaaatttgaacttaaaatttctgtgtacatttctattttcttatgagaaattgctgaaaatggacttattctaccaaaggggtacaagctttatgaaggctcttgatacgtactgccaaattgctttctgggaaggttctttcattttatgctcccacaagcagtatgttagagtgtccattttaccctattctcactagcactggattttattatttatattcttattttgataggcataaaatatgctattattttactagtattacaatgaattattggtgactaggaaaaatattaaatataggttttatggtatttattagtttttgccctatttcctttttgtttgttttttgtttttgttttatgtgcagtcgactcttgaacgatgcagttttgtactgcatgggcccacttaataatgagggttttttttttccaataaatacagtatcagtgtgttcctcatctgcaaccaaacgcggatccaaaatacagtcgtccctaagtatccttgggggattggtttcagggattgcccttgagtaccaaaccccatgcattctcaagtcctgcagtggccctgtggaacccatggatatgaagtcagccctctgtatccgtctccaggagtttcatattttgtgaataccgtatttttgatctaggtttggttgtggatgcagaacctgttgatacggagggccaactgtatttattgaaacaaatccatgtacaagtggacgcacgcagttctaacctgagttgttcaaggttcaaatgtacagtattcacaagatgcaaaacctgtgtacatgaggggcaacttttcttatccgtgggttctgcagggctgctgaatgacttgagtatgggtggattttggtgtctgcctgtaatgcttaccacaatcaaatgaacatattcatcaccacacatagttaccattgtgtgtgcatgtgtgtgtgtggtgaggacacttaagattactcttttagcaaatttcaagtaacttttgactattattttcttgacgaagtatttgtattttcctattgatttctaagaacttttcatatagtcaggtacaactttacatagattgccattgtttttttttctttagtcttctttatggtaattttaacatacacaaaatattttttaaatttttaattttttgttggtatatagtaggtatatatatttatggtgtacatgagaagttttgatacaggcatgcaatgtgtaataatcacatcattgatcaccaaggaaatgcaaatcaaaaccacaaagtacttttttaaagtttatggagtcaaatctatttttccttgtcatctgttttcttccagtacttttatgcttagaaagtccttctgcatatagaggacaaataaacatttattctttatagttattttatggattcactttgtttttacatttagttctttaattcatctggaatttactatgacaagtagtatgaagacaaaaaaatcgatccttattttgcaccaaatagccaattgtcacgtaattgtttatggaataatacttccttttacctctgattttgtaatgctgagtttattagacaacaaaatcttatatattctaagatctgtttctgggctctttccattccattgaactatgccataccattttaaatattgtagttttacatttttccttggctattttgacctgtttattcttcttgaacttagtaggcccaccgattaagattttatttggaaaagcagtgtctctgcttttaatgagctgagtgaggcaaatcacttaacctctccatgcctttgtttcttcatctgtaaagtggggaaaagagtatctccttttgcccaagttccagggaaattgtgaggatcaaatgagatggttatgaaaacattttgaaaaagtaaaaaaaaaaaaaaaaaa

SEQ ID NO: 65 - protein, 112 aa, Homo sapiens
MVFISFCPISFLFVFCFCFMCSRLLNDAVLYCMGPLNNEGFFFPINTVSVCSSSATKRGSKIQSSLSILGGLVSGIALEYQTPCILKSCSGPVEPMDMKSALCIRLQEFHIL

SEQ ID NO: 66 - DNA, 3856 bp, Homo sapiens
  CDS (578)..(844)
atggaatatgttttagccaccagctacctgtacttaaaaacaaaaccccaaaaacctgctcatttgattttcagtaagagtctattaaaaattcttaaatcagaaaccaggtagtaaacaatttctgtaaaagccgattttcaagtggagacattttgacctggagctagtgaattcaatgaaaaaaacaaaaaacaaaaaacaaaaaaagctaagagagacacattatatccaatgtatgttataatacttatttaaagggtatcataatattttgagtttggggaaagttcaatcctaatgttaatgtttatgaggaaatgtgtaatattcatgcatttctatgcaattctctacttgccacaagccaaagaagaaacaatcaatttacaaataacacagaggcagtaaatttgttggtggtgatgctagctaggcctattgtaattccataattctgtagttttttttcaacctgcaagtggtgaattgctaatgttgctgggagccaaagatatggtgatatgtgaaagtgtccaggcagcgcttacattatgtaaggcttggaggtattttgatgtcagtaaaatactttatgggagtaataggaaaatgtgtactgttgaaatcatatccagaaaattcagagtttatgttgaattttatttcccaactcacatttgaggtttacaagttttgcttagtgtgcttggtgctactcgatcaattgagacacagttcctctctggtgggggttcatgtctgtgtccagacatcttgttggctgtgctctaatcacagtgatcattttgagctgttgttaagaaaaacatggcttccaacatagatgccttgttttctccaacaaatatttaagctatattgccacctccattttagttgtttctctttagatctggctgtcataatttatctgttttgcttcatccaagatgattgctgtaaacaggcatagggtgctgtcttcccttctaggcagcccagtaattccatctcagataatttctagttacctgttggatacttacgtgaaggtctgaataaattatgatcattacgaacatgatacatgagtaatgaattaaaagaaatatttaaaagttttatattttaagtctccagggagtaaggcattgagaaaatggggtaaatatttcttgtcgaagagaaatcaaatatgggtgaatcattgactactgggagtccttgggtttattctcagatctttcactttttggcagtattctggaagcaagttagtgacttgactgaagctcagtttgcacatctgtgaagaggacagtaatttctggtctcatagggctgttaagagcatggaatggaatccaattcggcttcatctatctttatttttcatgtaatctgtcaggcaccatgttagtggaatgtcttgtaaataatgaatcgtatagcctctggtctcaaggatctcataaacctactggacagatattatgtattttggtttcctacatgacatccaagttcatgaatcttttgaattctttccatacaacccaggatgcaagcttctggtaagacaaatggatatttattaagatcctgtaagaaacaaggcagaaaattaaagtcattaggagtatagaaataaaagatttcttgggctttcacctctgtaaacttgaggagtttggctaagtcagtagttggaagcgtagtaaggtcagaagtcaccgtcaacttccgttaaatcccaaagcttacaattatttaacagaggatcacctacgctaacagaatgttgggattttgtttgtttggggttttggtaaataattatatacattcaggggtcttagtactgggtagcttatataagtccaaaaatatgattgttagccttgccttttgattaataaaatgggggaaatatgttgttaaaaaaaaaaaaacgaaaaagggcaagaaactatttgaaaaccaggcattgggttgaattggaagtgaatacacttcaaaaggtctgaggagaaaatattagaaaccactgatttggataatgtctaatagctcttttaactcttagtcttttacctaaatatccttgatatttacagcatagtaaaatctggttttccaaggattctgatgaaagaaaagaaaaaaaatgaaaacagatggacaatctgagaagtaactagtgattgatggtaaatgtgaacaatgcttcagaaaggaaatgaaatgtctgcagcagatagaagtgtgtaaattttgccttcactttagagctagaatcactatgagtggtagcatttcagaatcagaagaatggaaagctcagttgattatcatcacacataggagtaaaaggaaaggttcacatttttattgacagctcatatcgaaaagacagctcctcttagagagaagtgaattctcctccttcttgttgtttcttctgccacctttgccctcatacagcacgctctatcttcatcttcttcccttttccctcctcctttcctgtcttttcttatcttcctccattctctccccatttcctttctgtgctccctctcctttctgcactcacctccttcacctttcatctgtaggtgacactaaaccaaggtttaagaagagccaccttggctgggtgcaatggcttacgcctgtaatcctagcattttgggaggctgaggcaagtggaacacaaggccaggagttcgagaccagcccagccaatgtggtgaaaccctgtctctactaaaaattcaaaaattagctgggcgtggtggcacgcgcctgtaatcccagctactcgggaggctgaggtaggagaattgcttgaaaccagaaggtggaggttgcagtgagccaagatcgcaccactgcactccagcctgggcagaagagtgaaactccgtctcaaaaaaaaaaaaaaaaaaaagccacctcacagagttgatggcagtgtgagtgctgctttttgtacattacctcattcagttctggacacaggaggggtctccaaatcatgctgcgtgggccagggagtctgatggaagaagtcatacttgagttatggctgtctcagggatgctgtgagttgactagcttgctgggaggctggagtctggctcacacattcagaacatttgcaggttactgagacaaccagtaccaaggacttgttctggagactaaccagatatggaaaacactgaggtaggcagaaatcagtttgtgatgggctattgatggtaaactaaggagctaaatggaaagctctggcaaacccttgaatgagagagaaatgatctaacagagaatcctctaacagaagtaggatgaacagattaaaggaaaaagtagggggagaccaggtgggaatctttcgcaccaagtcaggaaggaaatagagttgtcacaaaagctgagggaaggaagaggaggagaggcaaattcaagggactaaagaggttgactctttagaacttggcgatgatgtgaaaatgagtaagaaagagtttaggaggccaggcgcagtggctcacacctgtaatcccagcactttgggaggccaaggagggcggatcatctgaggtcaggggttcgagaccagcgtgaccaacatggtgaaaccccgtctctactagaaagacaaaagattagctgggcgtggtggcacacgcctgtaatcccagctacttgggaggctgagacaggagaattgcctgggaggtggaggttgcagtgagccaagatagtgccattgcactccaacctgggcaacaagaacgaaactctgtttcaaaaaaaaaagaaaaacaaaaaaaaaaaaaaaaaa

SEQ ID NO: 67 - protein, 89 aa, Homo sapiens [sequence omitted]

SEQ ID NO: 68 - DNA, 3304 bp, Homo sapiens
  CDS (211)..(873)
agccagggacctgcttggccagcgacagatcctttgctgctctgtctgccggttcttgaggtgaatgtcggaatccattatctttcgggaaagctctctggggcagggagcgtcctggggagttggaattcagaaggaatctctcagacgcaaatctccatctcctccctgcctcacctgggcagccttttcagactgtctctgcccagaatgtcaggagaggccacagtcttggcctaccatgctccagaagaacaggaaggacttctagttgtcaaggttgaagaagaaaattatgttttggaccaggactttggccttcaggaaaacccctggagccaagaggtattccggcagaagttcaggcagtttagttactctgactccactggccctcgggaggctctgagccggctgcgagagctttgctgtcagtggttgaggccggaggtgcactccaaggagcagatactggagctgctgatgttggagcagttcctggccatccttcctgaggagctgcaagcttggctgcgagagcatcggccagagaatggagaggaagctgtgactatgctggaggagctggaaaaagaactggaggagccaaggcaacaggacacaactcatggccaagaaatgttctggcaggaaatgacatccacaggagcactgaagtctctgtctctgaatagcccggtgcagcccttagagaaccagtgcaagactgagactcaggagtcccaggctttccaggagagagatggggtctcactctgtcacccaggttggagtgcagtggtgcaaccacggctcactgcagcagccttgaacccctgggttagggtgatcctcctgcctcggcctccagagtagctgggactgcggttgtacaccaccatgcctggctaaatatccataatattcaaagctcagtattctgttatttaattttggcttcattggcaagacagtccctaagatggagatgaatacattttcagtaatagaaaccacataatcatttgaacagggaaagtttaatgttaagaattattaactactaagtgttataacaaaaagtgaaactcaaaagaatacagcaataacagatatagagtgtctctagggctgaggcagaacatcaaaggtaagaacaaatttgcaggagggtgccacaacttcccctttcctgccaggtcttagatccaggccttgttggagagggcacagccacagcccactggatggagatgccactgcagtgctgagctggcagaactcactgaggagccacactctggggtgctagaagctccccatggggagctgacctggtacagaacttgctgggaagctacccatggggatggggcctttggaactcattgggatgtgcactgctgggtgtcccatgtgctacagaaacaaacacaaagaacatgccagaaccaggaagaaaagccctttcttccagttcctctgcaaccccctctattgataaagctcacagcatgccagctggcaaatagtccagtatcacagacagggcaatgaagcgtagatttgaaactgaggcaataaattgatagctgtcacagatgccagggattagaactgaaaggactttgattatgttattggcaaaatcatccttatgggcagcagatatatcaggtataccagcttgttctcattaatcttttgttaaatctgactacccttctgattttgtcttcaccaagcaatcttattaacttcctatgaagcttagctgtaataagaaaattgcatttgttcagtctggtccatgtgatggttacattactcattaattctcattctgtttttattactgagtttcacgggcttagttattaagagtctaccccaagagataaatctattttttgtatgatgataaaattaggtatatgaggacctaagcccaaaggccagaccctggacttcggcagttcaccaaaggaatccataccatccatccactgaattcttctgggaaactgcttcccaaccttccccaggcatcataccctgatactaccattagccaagcaggccctcttaagtatcttctgcaccaagcaggtgctacattaaaacgggttttgaaaattcatctcaaggaaatcaagctgtctctatttgcagataatatgatcccatgtctagaaaaccctatcgtctcagccccaaagcttcttaagccaagaagcaactacagcaaagtctcaggatacaaaattaatgtgcaaaaatcataagcattcctatatacagagattcctatatctctgtgtctgtactgcacacctgaacaacaatagacaaccagagagccaaacatgattaactcccattcacaattgctacaaagagaataaaatacctaggaatacagctaacaagggaggtgaagggcctcttcaaggagaactacaaaccactgctcaaggaaatcagagaggacacaaacaaatggagaaacattccatgcttatggataggaagaattaatatcatgaaaatggccatactgcccaaagtaatttatagattcagtgttattcccattaaactaccattgacattcttcacagaattagaaaaaaatactttaaaattcatatggtacaaaaaaaagagcccttatagccaagacaatcctaagcaaaaagaacaaagctggaggcatcatgccacctgccttcaatctgtactacaaggctactataacccaaacagcatggtactggtacaaaaacagacacatagaccaatggaacagaatagagatctgagaaataagactgcacatctacaaccacttgatatttgacaaacctgacacaaacaagcaatggggaaaggattacctatttgataaatggtgctgggaaaactggctagccatatgcagaaaactgaaactggatccctcctttacaccttgtacaaaaataaactcaacatggactaaagacttaaatgtaaaacccaaaactataaaatccctagtaaaaaaatctaggtaataccattcaggacataggcatgggcaaagatttcatgatgaaaatgtcaaaagcaattgcaatagaagcaaaaattgacaaatgggacgtaattaaagagcttttgcacagcaaaagaacctattataagagtgaacagacaacgtacagaatgggagaaaatttttgcaatctatccatctgacaaaggtctaatatccaggatctacaagaaacttaaacaaatttacaaaaaaaaaaacaaaaaa

SEQ ID NO: 69 - protein, 221 aa, Homo sapiens
MSGEATVLAYHAPEEQEGLLVVKVEEENYVLDQDFGLQENPWSQEVFRQKFRQFSYSDSTGPREALSRLRELCCQWLRPEVHSKEQILELLMLEQFLAILPEELQAWLREHRPENGEEAVTMLEELEKELEEPRQQDTTHGQEMFWQEMTSTGALKSLSLNSPVQPLENQCKTETQESQAFQERDGVSLCHPGWSAVVQPRLTAAALNPWVRVILLPRPPE

SEQ ID NO: 70 - DNA, 2319 bp, Homo sapiens
  CDS (280)..(1923)
cgctcccggagctgggcggagcggggcgcagcccacgtggttcgggcgggaggcgccgggacgtggccagttgcccgcctgccccggagagccaggcgctaaccagccgctctgcgccccgcgccctgcttgcccccattatccagccttgccccggcgccctgacctgacgccctggcctgacgccctgcttcgtcgcctcctttctctcccaggtgctggaccagggactgagcgtcccccggagagggtccggtgtgaccccgacaagaagcagaaatggggaagaaactggatctttccaagctcactgatgaagaggcccagcatgtcttggaagttgttcaacgagattttgacctccgaaggaaagaagaggaacggctagaggcgttgaagggcaagattaagaaggaaagctccaagagggagctgctttccgacactgcccatctgaacgagacccactgcgcccgctgcctgcagccctaccagctgcttgtgaatagcaaaaggcagtgcctggaatgtggcctcttcacctgcaaaagctgtggccgcgtccacccggaggagcagggctggatctgtgacccctgccatctggccagagtcgtgaagatcggctcactggagtggtactatgagcatgtgaaagcccgcttcaagaggttcggaagtgccaaggtcatccggtccctccacgggcggctgcagggtggagctgggcctgaactgatatctgaagagagaagtggagacagcgaccagacagatgaggatggagaacctggctcagaggcccaggcccaggcccagccctttggcagcaaaaaaaagcgcctcctctccgtccacgacttcgacttcgagggagactcagatgactccactcagcctcaaggtcactccctgcacctgtcctcagtccctgaggccagggacagcccacagtccctcacagatgagtcctgctcagagaaggcagcccctcacaaggctgagggcctggaggaggctgatactggggcctctgggtgccactcccatccggaagagcagccgaccagcatctcaccttccagacacggcgccctggctgagctctgcccgcctggaggctcccacaggatggccctggggactgctgctgcactcgggtcgaatgtcatcaggaatgagcagctgcccctgcagtacttggccgatgtggacacctctgatgaggaaagcatccgggctcacgtgatggcctcccaccattccaagcggagaggccgggcgtcttctgagagtcagatctttgagctgaataagcatatttcagctgtggaatgcctgctgacctacctggagaacacagttgtgcctcccttggccaagggtctaggtgctggagtgcgcacggaggccgatgtagaggaggaggccctgaggaggaagctggaggagctgaccagcaacgtcagtgaccaggagacctcgtccgaggaggaggaagccaaggacgaaaaggcagagcccaacagggacaaatcagttgggcctctcccccaggcggacccggaggtttcagacattgaatccaggattgcagccctgagggccgcagggctcacggtgaagccctcgggaaagccccggaggaagtcaaacctcccgatatttctccctcgagtggctgggaaacttggcaagagaccagaggacccaaatgcagacccttcaagtgaggccaaggcaatggctgtgccctatcttctgagaagaaagttcagtaattccctgaaaagtcaaggtaaagatgatgattcttttgatcggaaatcagtgtaccgaggctcgctgacacagagaaaccccaacgcgaggaaaggaatggccagccacaccttcgcgaaacctgtggtggcccaccagtcctaacgggacaggacagagagacagagcagccctgcactgttttccctccaccacagccatcctgtccctcattggctctgtgctttccactatacacagtcaccgtcccaatgagaaacaagaaggagcaccctccacatggactcccacctgcaagtggacagcgacattcagtcctgcactgctcacctgggtttactgatgactcctggctgccccaccatcctctctgatctgtgagaaacagctaagctgctgtgacttccctttaggacaatgttgtgtaaatctttgaaggacacaccgaagacctttatactgtgatcttttacccctttcactcttggctttcttatgttgctttcatgaatggaatggaaaaaagatgactcagtt

SEQ ID NO: 71 - protein, 548 aa, Homo sapiens
MGKKLDLSKLTDEEAQHVLEVVQRDFDLRRKEEERLEALKGKIKKESSKRELLSDTAHLNETHCARCLQPYQLLVNSKRQCLECGLFTCKSCGRVHPEEQGWICDPCHLARVVKIGSLEWYYEHVKARFKRFGSAKVIRSLHGRLQGGAGPELISEERSGDSDQTDEDGEPGSEAQAQAQPFGSKKKRLLSVHDFDFEGDSDDSTQPQGHSLHLSSVPEARDSPQSLTDESCSEKAAPHKAEGLEEADTGASGCHSHPEEQPTSISPSRHGALAELCPPGGSHRMALGTAAALGSNVIRNEQLPLQYLADVDTSDEESIRAHVMASHHSKRRGRASSESQIFELNKHISAVECLLTYLENTVVPPLAKGLGAGVRTEADVEEEALRRKLEELTSNVSDQETSSEEEEAKDEKAEPNRDKSVGPLPQADPEVSDIESRIAALRAAGLTVKPSGKPRRKSNLPIFLPRVAGKLGKRPEDPNADPSSEAKAMAVPYLLRRKFSNSLKSQGKDDDSFDRKSVYRGSLTQRNPNARKGMASHTFAKPVVAHQS

SEQ ID NO: 72 - DNA, 4779 bp, Homo sapiens
  CDS (121)..(3135)
catctccgcagtctgggccgctgggtgcagaggctgccgcagacccagcggccatcgcctccctcaatcccaatatccattgtctcccaccccacctggccctccacttcccccacaaccatggcgcacgaatccgagaggagctctcgtctcggggtgccctgcggggagccggcagagctcggaggtgatgctagcgaggaggatcacccccaagtctgtgccaagtgctgcgcacaattcactgacccaactgaattcctcgcccaccagaacgcatgttctactgaccctcctgtaatggtgataattgggggccaggagaaccccaacaactcttcggcctcctctgaaccccggcctgagggtcacaataatcctcaggtcatggacacagagcatagcaaccccccagattctgggtcctccgtgcccacggatcccacctggggcccagagaggagaggagaggagtcttcagggcatttcctggtcgctgccacaggtacagcggctgggggaggcgggggcctgatcttggccagtcccaagctgggagcaaccccattacctccagaatcgacccctgcaccccctcctcctccaccaccccctccgcccccaggggtaggcagtggccacttgaatatccccctgatcttggaagagctacgggtgctgcagcagcggcagatccatcagatgcagatgactgagcaaatctgcaggcaggtgctgttgcttggctccttaggccagacggtgggtgcccctgccagtccctcagagctacctgggacagggactgcctcttccaccaagcccctactacccctcttcagccccatcaagcctgtccaaaccagcaagacactggcatcttcctcctcctcctcctcttcctcttcaggggcagaaacgcccaagcaggccttcttccacctttaccacccactggggtcacagcatcctttctctgctggaggggttgggcgaagccacaaacccacccctgccccttccccagccttgccaggcagcacagatcagctgattgcctcgcctcatctggcattcccaagcaccacgggactactggcagcacagtgtcttggggcagcccgaggccttgaggccactgcctccccagggctcctgaagccaaagaatggaagtggtgagctgagctacggagaagtgatgggtcccttggagaagcctggtggaaggcacaaatgccgcttctgtgccaaagtatttggcagtgacagtgccctgcagatccaccttcgttcccacacgggtgagaggccctataagtgcaatgtctgtggaaaccgttttaccacccgtggcaacctcaaagtgcatttccaccggcatcgtgagaagtacccacatgtgcagatgaacccacacccagtaccagagcacctagactatgtcattaccagcagtggcttgccttatggtatgtccgtgccaccagagaaggccgaggaggaggcagccactccaggtggaggggttgagcgcaagcctctggtggcctccacaacagcactcagtgccacagagagcctgactctgctctccaccagtgcaggcacagccacggctccaggactccctgctttcaataagtttgtgctcatgaaagcagtggaacccaagaataaagctgatgaaaacacccccccagggagtgagggctcagccatcagtggagtggcagaaagtagcacggcaactcgcatgcaactaagtaagttggtgacttcactaccaagctgggcactgcttaccaaccacttcaagtccactggcagcttccccttcccctatgtgctagagcccttgggggcctcaccctctgagacatcaaagctgcagcaactggtagaaaagattgaccggcaaggagctgtggcggtgacctcagctgcctcaggagcccccaccacctctgcccctgcaccttcatcctcagcctcttctggacctaaccagtgtgtcatctgtctccgagtgcttagctgtcctcgggccctacgccttcattatggccaacatggaggtgagaggcccttcaaatgcaaagtgtgtggcagagccttctccaccaggggtaatctgcgtgcacatttcgtgggccacaaggccagtccagctgcccgggcacagaattcctgccccatctgccagaagaagttcaccaatgctgtcactctgcagcagcatgtccggatgcacctggggggccagatccccaacggtggtactgcactccctgaaggtggaggagctgctcaggagaatggctccgagcaatctacagtctccggggcagggagtttcccccagcagcagtcccagcagccatcaccggaagaggagttgtctgaggaggaggaagaggaggatgaggaagaagaggaagatgtgactgatgaagattccctggcagggagaggctcagagagtggaggtgagaaggcaatatcagtgagaggtgattcagaagaggcatctggggcagaggaggaggtggggacagtggcggcagcagccacagctgggaaggagatggacagtaatgagaaaactactcaacagtcttctttgccaccaccaccaccacctgacagcctggatcagcctcagccaatggagcagggaagcagtggtgttttaggaggcaaggaagaggggggcaaaccggagagaagctcaagtccggcatcagcactcaccccagaaggggaagccaccagcgtgaccttggtagaggagctgagcctgcaggaggcaatgagaaaggagccaggagagagcagcagcagaaaggcctgcgaagtgtgtggccaggcctttccctcccaggcagctctggaggagcatcagaagacccaccccaaggaggggccgctcttcacttgtgttttctgcaggcagggctttcttgagcgggctaccctcaagaagcatatgctcctggcacaccaccaggtacagccctttgccccccatggccctcagaatattgctgctctttctctagtccctggctgttcgccttccatcacctccacagggctctccccctttccccgaaaagatgaccccacgatcccatgagcctgtttttctgtacctgctgctctttgtcccacagagcagaaacagcttcacaaaaggacctcccagagttatgagccctgattttgtctttttctctaagttcttaacatgttatgtccctagtggcttttctgtagtccctgagcttggaaattactgtgcttacaaggggatggccccctaaggaatttttcttccctcctcattctttgtacctgaggaacatagattctctgcagctttctcaaggggaaccctctccagcttccctggtgtgacccttcttccccctcctctctcctctccctttccctttggtaggtgcacctgagcacctacatttggcattgcagcctagccaaaaagggctggcagctgtctctggagggcccagtgccactcctctggggtgacctttctgctcagctggtgggtatgggtcccctatctttctagaaccagtatgtggcattcctgtcaaatggcctgcccatgaagccctggaattccagctccacctccactaccactccaagcctggccccaccagtgctgtttggcctaggaactgtggctgggaaggtgcctccaacaatgggatccagggaagccaaggagaagacagcccccctcctatttcagcctcctgcacccaaggcagtgcctgagaagcccatcatagacaagaagtagcaaactgtacattccttcttcctccccctgctccagaaggtgccggtactgaagatgctccagtaattggtgacccaaccctaggaagtagggagaaatgaaggaagggcataggaaaattttcccagtaaatcccctgatggtcacattaaggtaaaggttttggctggtcagtgtgccaagacctctccagcttctcattcatgatgacctctcaaagttgggaaacaagctgatttcttgccaagaggtctcccaggagatatttgggaaatgtgaagttcgtatctttaaggagcatttttggtcagcatggttgatgaactaatgatgagagagttaaggaatgttgctagaacatagggcttgctggtacctatgtgactaagaaagggacatgatgtaagggaaaaggcctcaaattcttgtgaatgtctggacattctcgttaatattcttttgggctaatagtgacatagtgtgcagaggtgtaccagggatcatgggggatttcctagcactagtatgcttctagttttagataactccctcctttattccctggccccttgtattttccttatcttcctctttcaagacccctacccattttgcctatccgtaggctggggcttgtgtctttgtcattgtctggttcttaagagtcccagactttgggagaccagctccaggtggcgtcctccctgcctctccgtcttgtaatgagttgtagtatttactcttaacataggatcatttggaacaggagttctgaggaggagagagtgagggttttgctattgactgacttgaacgatggcttctcctcaagctgtaggctccagagcttcctaacctagtaaaatgtcaagaacagacgggagatattagtgtctttccctctatcattaaaggtgttttaaccaaaaaaaaaaaaaaaaaaaa

SEQ ID NO: 73 - protein, 1005 aa, Homo sapiens [sequence omitted]

SEQ ID NO: 74 - DNA, 1687 bp, Homo sapiens
  CDS (121)..(717)
catctccgcagtctgggccgctgggtgcagaggctgccgcagacccagcggccatcgcctccctcaatcccaatatccattgtctcccaccccacctggccctccacttcccccacaaccatggcgcacgaatccgagaggagctctcgtctcggggtgccctgcggggagccggcagagctcggaggtgatgctagcgaggaggatcacccccaagtctgtgccaagtgctgcgcacaattcactgacccaactgaattcctcgcccaccagaacgcatgttctactgaccctcctgtaatggtgataattgggggccaggagaaccccaacaactcttcggcctcctctgaaccccggcctgagggtcacaataatcctcaggtcatggacacagagcatagcaaccccccagattctgggtcctccgtgcccacggatcccacctggggcccagagaggagaggagaggagtcttcagggcatttcctggtcgctgccacagaaccagtatgtggcattcctgtcaaatggcctgcccatgaagccctggaattccagctccacctccactaccactccaagcctggccccaccagtgctgtttggcctaggaactgtggctgggaaggtgcctccaacaatgggatccagggaagccaaggagaagacagcccccctcctatttcagcctcctgcacccaaggcagtgcctgagaagcccatcatagacaagaagtagcaaactgtacattccttcttcctccccctgctccagaaggtgccggtactgaagatgctccagtaattggtgacccaaccctaggaagtagggagaaatgaaggaagggcataggaaaattttcccagtaaatcccctgatggtcacattaaggtaaaggttttggctggtcagtgtgccaagacctctccagcttctcattcatgatgacctctcaaagttgggaaacaagctgatttcttgccaagaggtctcccaggagatatttgggaaatgtgaagttcgtatctttaaggagcatttttggtcagcatggttgatgaactaatgatgagagagttaaggaatgttgctagaacatagggcttgctggtacctatgtgactaagaaagggacatgatgtaagggaaaaggcctcaaattcttgtgaatgtctggacattctcgttaatattcttttgggctaatagtgacatagtgtgcagaggtgtaccagggatcatgggggatttcctagcactagtatgcttctagttttagataactccctcctttattccctggccccttgtattttccttatcttcctctttcaagacccctacccattttgcctatccgtaggctggggcttgtgtctttgtcattgtctggttcttaagagtcccagactttgggagaccagctccaggtggcgtcctccctgcctctccgtcttgtaatgagttgtagtatttactcttaacataggatcatttggaacaggagttctgaggaggagagagtgagggttttgctattgactgacttgaacgatggcttctcctcaagctgtaggctccagagcttcctaacctagtaaaatgtcaagaacagacgggagatattagtgtctttccctctatcattaaaggtgttttaaccaaaaaaaaaaaaaaaaaaaa

SEQ ID NO: 75 - protein, 198 aa, Homo sapiens
MAHESERSSRLGVPCGEPAELGGDASEEDHPQVCAKCCAQFTDPTEFLAHQNACSTDPPVMVIIGGQENPNNSSASSEPRPEGHNNPQVMDTEHSNPPDSGSSVPTDPTWGPERRGEESSGHFLVAATEPVCGIPVKWPAHEALEFQLHLHYHSKPGPTSAVWPRNCGWEGASNNGIQGSQGEDSPPPISASCTQGSA

SEQ ID NO: 76 - protein, 1028 aa, Homo sapiens
PLQRYGHSLALYQENIFMYGGRIETNDGNVTDELWVFNIHSQSWSTKTPTVLGHGQQYAVEGHSAHIMELDSRDVVMIIIFGYSAIYGYTSSIQEYHISSNTWLVPETKGAIVQGGYGHTSVYDEITKSIYVHGGYKALPGNKYGLVDDLYKYEVNTKTWTILKESGFARYLHSAVLINGAMLIFGGNTHNDTSLSNGAKCFSADFLAYDIACDEWKILPKPNLHRDVNRFGHSAVVINGSMYIFGGFSSVLLNDILVYKPPNCKAFRDEELCKNAGPGIKCVWNKNHCESWESGNTNNILRAKCPPKTAASDDRCYRYADCASCTANTNGCQWCDDKKCISANSNCSMSVKNYTKCHVRNEQICNKLTSCKSCSLNLNCQWDQRQQECQALPAHLCGEGWSHIGDACLRVNSSRENYDNAKLYCYNLSGNLASLTTSKEVEFVLDEIQKYTQQKVSPWVGLRKINISYWGWEDMSPFTNTTLQWLPGEPNDSGFCAYLERAAVAGLKANPCTSMANGLVCEKPVVSPNQNARPCKKPCSLRTSCSNCTSNGMECMWCSSTKRCVDSNAYIISFPYGQCLEWQTATCSPQNCSGLRTCGQCLEQPGCGWCNDPSNTGRGHCIEGSSRGPMKLIGMHHNEMVLDTNLCPKEKNYEWSFIQCPACQCNGHSTCINNNVCEQCKNLTTGKQCQDCMPGYYGDPTNGGQCTACTCSGHANICHLHTGKCFCTTKGIKGDQCQLCDSENRYVGNPLRGTCYYSLLIDYQFTFSLLQEDDRHHTAINFIANPEQSNKNLDISINASNNFNLNITWSVGSTAGTISGEETSIVSKNNIKEYRDSFSYEKFNFRSNPNITFYVYVSNFSWPIKIQIAFSQHNTIMDLVQFFVTFFSCFLSLLLVAAVVWKIKQTCWASRRREQLLRERQQMASRPFASVDVALEVGAEQTEFLRGPLEGAPKPIAIEPCAGNRAAVLTVFLCLPRGSSGAPPPGQSGLAIASALIDISQQKASDSKDKTSGVRNRKHLSTRQGTCV

SEQ ID NO: 77 - protein, 1339 aa, Homo sapiens
KTALLLHGVFLLLLIFFLEQGKGNLHVTSPEDAECRRTKERLSNGNSRGSVSKSSRNIPRRHTLGGPRSSKEILGMQTSEMDRKREAFLEHLKQKYPHHASAIMGHQERLRDQTRSPKLSHSPQPPSLGDPVEHLSETSADSLEAMSEGDAPTPFSRGSRTRASLPVVRSTNQTKERSLGVLYLQYGDETKQLRMPNEITSADTIRALFVSAFPQQLTMKMLESPSVAIYIKDESRNVYYELNDVRNIQDRSLLKVYNKDPAHAFNHTPKTMNGDMRMQRELVYARGDGPGAPRPGSTAHPPHAIPNSPPSTPVPHSMPPSPSRIPYGGTRSMVVPGNATIPRDRISSLPVSRPISPSPSAILERRDVKPDEDMSGKNIAMYRNEGFYADPYLYHEGRMSIASSHGGHPLDVPDHIIAYHRTAIRSASAYCNPSMQAEMHMEQSLYRQKSRKYPDSHLPTLGSKTPPASPHRVSDLRMIDMHAHYNAHGPPHTMQPDRASPSRQAFKKEPGTLVYIEKPRSAAGLSSLVDLGPPLMEKQVFAYSTATIPKDRETRERMQAMEKQIASLTGLVQSALFKGPITSYSKDASSEKMMKTTANRNHTDSAGTPHVSGGKMLSALESTVPPSQPPPVGTSAIHMSLLEMRRSVAELRLQLQQMRQLQLQNQELLRAMMKKAELEISGKVMETMKRLEDPVQRQRVLVEQERQKYLHEEEKIVKKLCELEDFVEDLKKDSTAASRLVTLKDVEDGAFLLRQVGEAVATLKGEFPTLQNKMRAILRIEVEAVRFLKEEPHKLDSLLKRVRSMTDVLTMLRRHVTDGLLKGTDAAQAAQYMAMEKATAAEVLKSQEEAAHTSGQPFHSTGAPGDAKSEVVPLSGMMVRHAQSSPVVIQPSQHSVALLNPAQNLPHVASSPAVPQEATSTLQMSQAPQSPQIPMNGSAMQSLFIEEIHSVSAKNRAVSIEKAEKKWEEKRQNLDHYNGKEFEKLLEEAQANIMKSIPNLEMPPATGPLPRGDAPVDKVELSEDSPNSEQDLEKLGGKSPPPPPPPPRRSYLPGSGLTTTRSGDVVYTGRKENITAKASSEDAGPSPQTRATKYPAEEPASAWTPSPPPVTTSSSKDEEEEEEEGDKIMAELQGSSGAPQTSRMPVPMSAKNRPGTLDKPGKQSKLQDPRQYRQANGSAKKSGGDFKPTSPSLPASKIPALSPSSGKSSSLPSSSGDSSNLPNPPATKPSIASNPLSPQTGPPAHSASLIPSVSNGSLKFQSLTHTGKGHHLSFSPQSQNGRAPPPLSFSSSPPSPASSVSLNQGAKGTRTIHTPSLTSYKAQNGSSSKATPSTAKETS

SEQ ID NO: 78 - protein, 1973 aa, Homo sapiens
MLIHQQLCLNFARSLWYQQTLPPHEAKHYLSLFLSCYQTGASLVTHFYPLMGVELNDRLLGSQLLACTLSHNTLFGEAPSDLMVKPDGPYDFYQHPNVPEARQCQPVLQGFSEAVSHLLQDWPEHPALEQLLVVMDRIRSFPLSSPISKFLNGLEILLAKAQDWEENASRALSLRKHLDLISQMIIRWRKLELNCWSMSLDNTMKRHTEKSTKHWFSIYQMLEKHMQEQTEEQEDDKQMTLMLLVSTLQAFIEGSSLGEFHVRLQMLLVFHCHVLLMPQVEGKDSLCSVLWNLYHYYKQFFDRVQAKIVELRSPLEKELKEFVKISKWNDVSFWSIKQSVEKTHRTLFKFMKKFEAVLSEPCRSSLVESDKEEQPDFLPRPTDGAASELSSIQNLNRALRETLLAQPAAGQATIPEWCQGAAPSGLEGELLRRLPKLRKRMRKMCLTFMKESPLPRLVEGLDQFTGEVISSVSELQSLKVEPSAEKEKQRSEAKHILMQKQRALSDLFKHLAKIGLSYRKGLAWARSKNPQEMLHLHPLDLQSALSIVSSTQEADSRLLTEISSSWDGCQKYFYRSLARHARLNAALATPAKEMGMGNVERCRGFSAHLMKMLVRQRRSLTTLSEQWIILRNLLSCVQEIHSRLMGPQAYPVAFPPQDGVQQWTERLQHLAMQCQILLEQLSWLLQCCPSVGPAPGHGNVQVLGQPPGPCLEGPELSKGQLCGVVLDLIPSNLSYPSPIPGSQLPSGCRMRKQDHLWQQSTTRLTEMLKTIKTVKADVDKIRQQSCETLFHSWKDFEVCSSALSCLSQVSVHLQGLESLFILPGMEVEQRDSQMALVESLEYVRGEISKAMADFTTWKTHLLTSDSQGGNQMLDEGFVEDFSEQMEIAIRAILCAIQNLEERKNEKAEENTDQASPQEDYAGFERLQSGHLTKLLEDDFWADVSTLHVQKIISAISELLERLKSYGEDGTAAKHLFFSQSCSLLVRLVPVLSSYSDLVLFFLTMSLATHRSTAKLLSVLAQVFTELAQKGFCLPKEFMEDSAGEGATEFHDYEGGGIGEGEGMKDVSDQIGNEEQVEDTFQKGQEKDKEDPDSKSDIKGEDNAIEMSEDFDGKMHDGELEEQEEDDEKSDSEGGDLDKHMGDLNGEEADKLDERLWGDDDEEEDEEEEDNKTEETGPGMDEEDSELVAKDDNLDSGNSNKDKSQQDKKEEKEEAEADDGGQGEDKINEQIDERDYDENEVDPYHGNQEKVPEPEALDLPDDLNLDSEDKNGGEDTDNEEGEEENPLEIKEKPEEAGHEAEERGETETDQNESQSPQEPEEGPSEDDKAEGEEEMDTGADDQDGDAAQHPEEHSEEQQQSVEEKDKEADEEGGENGPADQGFQPQEEEEREDSDTEEQVPEALERKEHASCGQTGVENMQNTQAMELAGAAPEKEQGKEEHGSGAADANQAEGHESNFIAQLASQKHTRKNTQSFKRKPGQADNERSMGDHNERVHKRLRTVDTDSHAEQGPAQQPQAQVEDADAFEHIKQGSDAYDAQTYDVASKEQQQSAKDSGKDQEEEEIEDTLMDTEEQEEFKAADVEQLKPEEIKSGTTAPLGFDEMEVEIQTVKTEEDQDPRTDKAHKETENEKPERSRESTIHTAHQFLMDTIFQPFLKDVNELRQELERQLEMWQPRESGNPEEEKVAAEMWQSYLILTAPLSQRLCEELRLILEPTQAAKLKGDYRTGKRLNIRKVIPYIASQFRKDKIWLRRTKPSKRQYQICLAIDDSSSMVDNHTKQLAFESLAVIGNALTLLEVGQIAVCSFGESVKLLHPFHEQFSDYSGSQILRLCKFQQKKTKIAQFLESVANMFAAAQQLSQNISSETAQLLLVVSDGRGLFLEGKERVLAAVQAARNANIFVIFVVLDNPSSRDSILDIKVPIFKGPGEMPEIRSYMEEFPFPYYIILRDVNALPETLSDALRQWFELVTASDHP

SEQ ID NO: 79 - protein, 1356 aa, Homo sapiens
MCEPQTLCHILGFKFKFYQEPNGETPSSLYRVAAVLLQFNLIDLDDLYVHLLPADNCIMDEHKREIAEAKQIVRKLTMVVLSSEKMDEREKEKEKEEEKVEKPPDNQKLGLLEALLKIGDWQHAQNIMDQMPPYYAASHKLIALAICKLIHITIEPLYRRVGVPKGAKGSPVNALQNKRAPKQAESFEDLRRDVFNMFCYLGPHLSHDPILFAKVVRIGKSFMKEFQSDGSKQEDKEKTEVILSCLLSITDQVLLPSLSLMDCNACMSEELWGMFKTFPYQHRYRLYGQWKNETYNSHPLLVKVKAQTIDRAKYIMKRLTKENVKPSGRQIGKLSHSNPTILFDYILSQIQKYDNLITPVVDSLKYLTSLNYDVLAYCIIEALANPEKERMKHDDTTISSWLQSLASFCGAVFRKYPIDLAGLLQYVANQLKAGKSFDLLILKEVVQKMAGIEITEEMTMEQLEAMTGGEQLKAEGGYFGQIRNTKKSSQRLKDALLDHDLALPLCLLMAQQRNGVIFQEGGEKHLKLVGKLYDQCHDTLVQFGGFLASNLSTEDYIKRVPSIDVLCNEFHTPHDAAFFLSRPMYAHHISSKYDELKKSEKGSKQQHKVHKYITSCEMVMAPVHEAVVSLHVSKVWDDISPQFYATFWSLTMYDLAVPHTSYEREVNKLKVQMKAIDDNQEMPPNKKKKEKERCTALQDKLLEEEKKQMEHVQRVLQRLKLEKDNWLLAKSTKNETITKFLQLCIFPRCIFSAIDAVYCARFVELVHQQKTPNFSTLLCYDRVFSDIIYTVASCTENEASRYGRFLCCMLETVTRWHSDRATYEKECGNYPGFLTILRATGFDGGNKADQLDYENFRHVVHKWHYKLTKASVHCLETGEYTHIRNILIVLTKILPWYPKVLNLGQALERRVHKICQEEKEKRPDLYALAMGYSGQLKSRKSYMIPENEFHHKDPPPRNAVASVQNGPGGGPSSSSIGSASKSDESSTEETDKSRERSQCGVKAVNKASSTTPKGNSSNGNSGSNSNKAVKENDKEKGKEKEKEKKEKTPATTPEARVLGKDGKEKPKEERPNKDEKARETKERTPKSDKEKEKFKKEEKAKDEKFKTTVPNAESKSTQEREREKEPSRERDIAKEMKSKENVKGGEKTPVSGSLKSPVPRSDIPEPEREQKRRKIDTHPSPSHSSTVKDSLIELKESSAKLYINHTPPPLSKSKEREMDKKDLDKSRERSREREKKDEKDRKERKRDHSNNDREVPPDLTKRRKEENGTMGVSKHKSESPCESPYPNEKDKEKNKSKSSGKEKGSDSFKSEKMDKISSGGKKESRHDKEKIEKKEKRDSSGGKEEKKHHKSSDKHR

SEQ ID NO: 80 - protein, 147 aa, Homo sapiens
MSGEATVLAYHAPEEQEGLLVVKVEEENYVLDQDFGLQENPWSQEVFRQKFRQFSYSDSTGPREALSRLRELCCQWLRPEVCMCSKECMSILELLMLEQFLAILPEELQAWLREHRQRMEGNCDYAGGAGKNWRSQGTDAGKCSGRK

SEQ ID NO: 81 - protein, 200 aa, Homo sapiens
MSRRKQRKPQQLISDCEGPSASENGDASEEDHPQVCAKCCAQFTDPTEFLAHQNACSTDPPVMVIIGGQENPNNSSASSEPRPEGHNNPQVMDTEHSNPPDSGSSVPTDPTWGPERRGEESSGHFLVAATEPVCGIPVKWPAHEALEFQLHLHYHSKPGPTSAVWPRNCGWEGASNNGIQGSQGEDSPPPISASCTQGSA

SEQ ID NO: 82 - protein, 1007 aa, Homo sapiens [sequence omitted]

SEQ ID NO: 83 - protein, 572 aa, Homo sapiens [sequence omitted]

SEQ ID NO: 84 - DNA, 893 bp, Homo sapiens
cattgtttaaaagatatttatttgttttgaaaagatttatttgagaaatatataaaaacgtgacagaacacttcataggccactttacacagcaaaatacacaataacatatttttgcaagcataaaacaggtatggtaaagagtcatgcaggtataacaattacaagcagacaaactatatttataaagaaataggtcaaaaatggaaatgtaacaaactatagaaatgatccctgaaagtatagtagtagggtggggggagggagagggatagcattaggagatatacctaatgtgaatgacgagtaaatgggtgcagcacaccaacatggcacatgtatacatatgtaacaaacctgcacgttgtgcacacgtatcctagaacttaaagtataataaaaatatatatatataaaatggaaatgtacaaatgtatattactgtggttggtaattgtgtgaccagctttataacatctgtcatctgaaacaccgtgacaaataacctaagtcttttgatatttggtcaaaacctgccatgggtcaccactgcatatgcagtctctcaaataatcgagatcttgagagagtttatctttcacaaatgcagatgtacaaaatggacatctcttaatttactgaggaagtttcaatgttgttatatacatgcacaatgcttacacacaacgtcaacattttgataatacactttacatagagtcaactctgcaaaaaatacataaaatgaattggaactctctaaaagtctctaagcaatttatatctccaatattgaaaatgatgcaaatatgagatatgtagcatagcaaattgtaaaacataatgctgacaatttaaaatagtggaaaaaaactaaaaaaaaaaaaaaaaaa

SEQ ID NO: 85 - DNA, 2547 bp, Homo sapiens
agatatataaaaaaccttatccctctttctaatctcttatgtcctgtgagtgtcacccattgagtaaacccaagtggaagtcagcaggaaagtagctgggatgatgcagtctttacagggtctctctgtcacccaggctgaagtgaaatggtgtgatctcggctcactgcaacctctgcctcctgggttcaagtgattctccagcctcagcctcccaaatagataccagtaaagatgtcatctggccaatttgtgtgaaaaaagagaataattctcatccaaaccgcctgtctctggaaataagaaaagctctgagggtctccaaagttaccagaggaaggctgaattttatggtgattgataatatttccaagcttatggagaaaaaaatatcattagtcttttccatggtagaaaagagtaaagcctgtaacaaaaaaagtgatacagtggatgggatgatgagacccttgaaataagcaaggatggaccagaaactggtaacactcacccatggaatttcattatgaagtcgtggcaagggccaagccgacctggatttgaaacccatctcttcaacgatgtagattttgacaacatatttgatttctctgggcctcagtttgttatctgcacaaaagggagatatgagtggttacgttattggattgtcatgaacattaaataggataatgtcaaatcattcagccaagtttctagcatatagtacaggttcaaatattatcttttttttcccaccaacctcttttccaggaaaatgcaaagctactctttagccaaattttaaaacaggggatatttattttgggaatcattaatacccatctgccccttttttggtccattggacatattgaaatgaatgattaatacttatcacttcatggtgtacacattgttttgtttcttatatccagagtctagtcctcaactctaaccaaagtaaaggaaactggaaagacacacgctttttcagtcattaatagaaagttgtccaggtaagtttctgatggtatatcagttagaaataatatttagctatttgtaataaaaagctgaaaacagtagcttgaatcaatggaagactttatctttctcctaatacagctgacaataatgttgttgcctttatgatatcaaagccccaggttccttttatctttctgcttaacctgccttggcaaatgcttgctgcttcatagtcacatgatggctgacttactgtaaccttcaggtagaaagaaaggaagaggtaaagagataaaggtacatcccagctgattcagtatctccttctctttgaaaactctcacagaaactgccctataacttctactgacatctcatctcaatggctagatcagtgctatataacaaaactttctgcagtgatagaaatgttctatatctgaactatccaagatgttagctactagccacttatgactgtttagcatttaaaatgtcacttgtggaactgacaaaatcaacttttaattttacttgattttaataaatttaaatttaaatagatacatgtgtctagtggctaccacaataaatagtgcagggctagaccttaatcacatcactaccccatctgcaagaaaagctggaaaatgaaggtttggagctaaacacgttgctaccctccacaaaattatgtttttcttagtaaggaaaaacaaacaaaaatgaatataggctgggcagataacagcctctgcaaccaagggatatttgcttgctaatattccttaagcccagaggaatggagtgctaatgggtttatcacaggcatgaaaaatggtgtgtctgggaagatattatgtagttaaaaagcagaatcttggagctggagttcaatccaaatactttctttttacaatgagaaaactgaggctcagagggacaactgagagacctcattaatagagcaataggaaaatctgctctgaaattatacagagctatttagtggcctttataacatcactcatgataaaatgtaaaatctcagaaagaaaatgccctctgcctatggtttttaaaatacaggaaagaaaagctagagattttgatgccacctattggtagacagaagtataaactgccctttcgtagcagcagaggttgttacccaatgttagaggcaccacaggtggtatagggttctcataaaaaggaatgacagacagtggaatatttaattcctgcatcagcttgcaacatgtatgttcattttcccttgactcttagcatcttagaaaaagtgctttcttagagtgttcctttctgctttccagtaatacatcacacctcaggcatatacagaaacaccagaggaagacatatcagtcagttctcaaaaatcacttgaaatagaaaaaaagaacaaatttttgagctataaatagccctggggtgagattcaaagttcttatatgatccacagcctcaaaaatatatcctgttatttacaacagtttcctttagtagttcttacagaaaaaaaaaaaaaaaaaa

SEQ ID NO: 86 - DNA, 840 bp, Homo sapiens
  CDS (287)..(706)
ttttcctccctaaaaatagacacagaaattgctgagtgcttctgtaaaaagacagaagcataaaatgaccattgtatttctatacattaggtacatgttccttcactagcttgcccaggaacaaaagcaaatatcaatggtttgctcttatcaattcataattctttatttccgtcacagtgtgttcccattgattacacacaggaataaaaatagaaaactctgagctggtgcctttgccagttgcgcagatgactttctgaacaaggaagttttatatgggtggatgggcataggaacttggcttgaaatgttaaaaaggcaggaaaaaaacagcagaatctatttttcattgtgggagagcccaggttgtcctgcttatctgaaattaagcccaaatcctaaaatttctgaatacctgctgtcagcttcctgcaaacgggccaggttgcctaaggaatgtcatgagagagctggcagaggcaggggacaggacaggcaccagcaaacaccacttcaccatgcagctattttcatgtcctcccagcccactgaagtgctgataatggcttggatcaattcaacaaacacatttcgtatacctcctttgcaccagacagtgttcaccgaggcacgcagggtggccgcaggtttaaacttacacgaatcgctttctggaggaggaggggacccgctgcgcgattgacacgcatattcctataggcatcctccctcagcccccacccccacggccggattcgggtggctcctctccgaggtgaaatctgagaagaaatccttggatctcttttcttaaaaaaaaaaaaaaaaaaaaaaaaa

SEQ ID NO: 87 - protein, 139 aa, Homo sapiens
MGIGTWLEMLKRQEKNSRIYFSLWESPGCPAYLKLSPNPKISEYLLSASCKRARLPKECHERAGRGRGQDRHQQTPLHHAAIFMSSQPTEVLIMAWINSTNTFRIPPLHQTVFTEARRVAAGLNLHESLSGGGGDPLRD

SEQ ID NO: 88 - DNA, 7103 bp, Homo sapiens
  CDS (147)..(5294)
gccgccgggtgtggtgagggcgacgcgcttgcagtcgccgtctcttgcttccccgtcctctgacatcgcctgcagccgagcgggcccgttccgccggagctgaggaccaggtattcaaataaagttaattgcagctttctgtgaaaatgtcagttttgatatcacagagcgtcataaattatgtagaggaagaaaacattcctgctctgaaagctcttcttgaaaaatgcaaagatgtagatgagagaaatgagtgtggccagactccactgatgatagctgccgaacaaggcaatctggaaatagtgaaggaattaattaagaatggagctaactgcaatctggaagatttggataattggacagcacttatatctgcatcgaaagaagggcatgtgcacatcgtagaggaactactgaaatgtggggttaacttggagcaccgtgatatgggaggatggacagctcttatgtgggcatgttacaaaggccgtactgacgtagtagagttgcttctttctcatggtgccaatccaagtgtcactggtctgcagtacagtgtttacccaatcatttgggcagcagggagaggccatgcagatatagttcatcttttactgcaaaatggtgctaaagtcaactgctctgataagtatggaaccacccctttagtttgggctgcacgaaagggtcatttggaatgtgtgaaacatttattggccatgggagctgatgtggatcaagaaggagctaattcaatgactgcacttattgtggcagtgaaaggaggttacacacagtcagtaaaagaaattttgaagaggaatccaaatgtaaacttaacagataaagatggaaatacagctttgatgattgcatcaaaggagggacatacggagattgtgcaggatctgctcgacgctggaacatatgtgaacatacctgacaggagtggggatactgtgttgattggcgctgtcagaggtggtcatgttgaaattgttcgagcgcttctccaaaaatatgctgatatagacattagaggacaggataataaaactgctttgtattgggctgttgagaaaggaaatgcaacaatggtgagagatatcttacagtgcaatcctgacactgaaatatgcacaaaggatggtgaaacgccacttataaaggctaccaagatgagaaacattgaagtggtggagctgctgctagataaaggtgctaaagtgtctgctgtagataagaaaggagatactcccttgcatattgctattcgtggaaggagccggaaactggcagaactgcttttaagaaatcccaaagatgggcgattactttataggcccaacaaagcaggcgagactccttataatattgactgtagccatcagaagagtattttaactcaaatatttggagccagacacttgtctcctactgaaacagacggtgacatgcttggatatgatttatatagcagtgccctggcagatattctcagtgagcctaccatgcagccacccatttgtgtggggttatatgcacagtggggaagtgggaaatctttcttactcaagaaactagaagacgaaatgaaaaccttcgccggacaacagattgagcctctctttcagttctcatggctcatagtgtttcttaccctgctactttgtggagggcttggtttattgtttgccttcacggtccacccaaatcttggaatagcagtgtcactgagcttcttggctctcttatatatattctttattgtcatttactttggtggacgaagagaaggagagagttggaattgggcctgggtcctcagcactagattggcaagacatattggatatttggaactcctccttaaattgatgtttgtgaatccacctgagttgccagagcagactactaaagctttacctgtgaggtttttgtttacagattacaatagactgtccagtgtaggtggagaaacttctctggctgaaatgattgcaaccctctcggatgcttgtgaaagagagtttggctttttggcaaccaggctttttcgagtattcaagactgaagatactcagggtaaaaagaaatggaaaaaaacatgttgtctcccatcttttgtcatcttcctttttatcattggctgcattatatctggaattactcttctggctatatttagagttgacccaaagcatctgactgtaaatgctgtcctcatatcaatcgcatctgtagtgggattggcctttgtgttgaactgtcgtacatggtggcaagtgctggactcgctcctgaattcccaaagaaaacgcctccataatgcagcctccaaactgcacaaattgaaaagtgaaggattcatgaaagttcttaaatgtgaagtggaattgatggccaggatggcaaaaaccattgacagcttcactcagaatcagacaaggctggtggtcatcatcgatggattagatgcctgtgagcaggacaaagtccttcagatgctggacactgtccgagttctgttttcaaaaggcccgttcattgccatttttgcaagtgatccacatattatcataaaggcaattaaccagaacctcaatagtgtgcttcgggattcaaatataaatggccatgactacatgcgcaacatagtccacttgcctgtgttccttaatagtcgtggactaagcaatgcaagaaaatttctcgtaacttcagcaacaaatggagacgttccatgctcagatactacagggatacaggaagatgctgacagaagagtttcacagaacagccttggggagatgacaaaacttggtagcaagacagccctcaatagacgggacacttaccgaagaaggcagatgcagaggaccatcactcgccagatgtcctttgatcttacaaaactgctggttaccgaggactggttcagtgacatcagtccccagaccatgagaagattacttaatattgtttctgtgacaggacgattactgagagccaatcagattagtttcaactgggacaggcttgctagctggatcaaccttactgagcagtggccataccggacttcatggctcatattatatttggaagagactgaaggtattccagatcaaatgacattaaaaaccatctacgaaagaatatcaaagaatattccaacaactaaggatgttgagccacttcttgaaattgatggagatataagaaattttgaagtgtttttgtcttcaaggaccccagttcttgtggctcgagatgtaaaagtctttttgccatgcactgtaaacctagatcccaaactacgggaaattattgcagatgttcgtgctgccagagagcagatcagtattggaggactggcgtaccccccgctccctctacatgagggtcctcctagggcgccatcagggtacagccagcccccatccgtgtgctcttccacgtccttcaatgggcccttcgcaggtggagtggtgtcaccacagcctcacagcagctattacagcggcatgacgggccctcagcatcccttctacaacagggggtcaggcccagccccaggcccagtggtattactgaattcactgaatgtggatgcagtatgtgagaagctgaaacaaatagaagggctggaccagagtatgctgcctcagtattgtaccacgatcaaaaaggcaaacataaatggccgtgtgttagctcagtgtaacattgatgagctgaagaaagagatgaatatgaattttggagactggcaccttttcagaagcacagtactagaaatgagaaacgcagaaagccacgtggtccctgaagacccacgtttcctcagtgagagcagcagtggcccagccccgcacggtgagcctgctcgccgcgcttcccacaacgagctgcctcacaccgagctctccagccagacgccctacacactcaacttcagcttcgaagagctgaacacgcttggcctggatgaaggtgcccctcgtcacagtaatctaagttggcagtcacaaactcgcagaaccccaagtctttcgagtctcaattcccaggattccagtattgaaatttcaaagcttactgataaggtgcaggccgagtatagagatgcctatagagaatacattgctcagatgtcccagttagaagggggccccgggtctacaaccattagtggcagatcttctccacatagcacatattacatgggtcagagttcatcagggggctctattcattcaaacctagagcaagaaaaggggaaggatagtgaaccaaagcccgatgatgggaggaagtcctttctaatgaagaggggagatgttatcgattattcatcatcaggggtttccaccaacgatgcttcccccctggatcctatcactgaagaagatgaaaaatcagatcagtcaggcagtaagcttctcccaggcaagaaatcttccgaaaggtcaagcctcttccagacagatttgaagcttaagggaagtgggctgcgctatcaaaaactcccaagtgacgaggatgaatctggcacagaagaatcagataacactccactgctcaaagatgacaaagacagaaaagccgaagggaaagtagagagagtgccgaagtctccagaacacagtgctgagccgatcagaaccttcattaaagccaaagagtatttatcggatgcgctccttgacaaaaaggattcatcggattcaggagtgagatccagtgaaagttctcccaatcactctctgcacaatgaagtggcggatgactcccagcttgaaaaggcaaatctcatagagctggaagatgacagtcacagcggaaagcggggaatcccacatagcctgagtggcctgcaagatccaattatagctcggatgtccatttgttcagaagacaagaaaagcccttccgaatgcagcttgatagccagcagccctgaagaaaactggcctgcatgccagaaagcctacaacctgaaccgaactcccagcaccgtgactctgaacaacaatagtgctccagccaacagagccaatcaaaatttcgatgagatggagggaattagggagacttctcaagtcattttgaggcctagttccagtcccaacccaaccactattcagaatgagaatctaaaaagcatgacacataagcgaagccaacgttcaagttacacaaggctctccaaagatcctccggagctccatgcagcagcctcttctgagagcacaggctttggagaagaaagagaaagcattctttgagaaaaacaagcaaaggagaagagtgttactgtacccttatgacagaattgtcctggattttgactccatccacgcccatcacctttctacattttgctgacagataactaaccgatgatgaggccgaggtaaaagagacatctgcagtgtgacagaagggagcatgagaagcatggctcaccagccagcctctgtggtctttgtaattagaagcttcagaactcactaatactactgtacctttcattggcgcattaccccataaaactttttgagacgaggtgagatctgagtataaagataggtcagaagtattttaaagggcttaatgtgccaaaaagaaaaaaagctagagaccctttttgcaaacatttggtgaccacacatttgagggaagacgtggcgttaggtgaagcagaagcaaaccctgctcttaggggctcacctaggtgagtgcacagcctgtgacgctacagggagaggctgagtaaaccgagatccagcgttctgtatggcaggggtattgcttatcacagaggttctgaagagtaggaagtacataatgaagagggctttaaaaattgccaacaaagtgagtcaccagggctggcagtagtgtgacggggctgtcctgagctgttaggagagtagatgcggggagggctggtgacctccgtgggtttatatgtcggaaactcttctctccaaatcccaggcctggcttccagcaccatccagctgtgcccaagaagccaccctggtctgttctccaactcttttaaatggtgcccaacttttctaagtgagcttagcaatgagaagaaaaaaaaacatgaattctttttctggaaaatcagggagacatgggtaataataggtactaataaatatttatagatgagtgaatgaggaaataattacatcaaaaaggtcagtgacaattgataaatgacaaggaaatatttaattaggtaaaactaaatcattgctctctatactaggatagactttatctacttcatctgttcctaagtcagcatgttagttctggggaaggatcataagaaaggaaatactttttaaaaaaaaatttggaaacatgtaacaaagcaagggtaaaatatatatatatatctatataagtgctgtgactgtaaaagtgtactttccattaattattagccgagttaagagaatggtcacattgaagtactgtgtggactagaaatgtaccctgtcatcatgcaatgaaatattgttatcgttttaacatagctcatttatgtagaatgaattctggtggtttaccccaagtcacagttaggacggtagatggtgagatcgcagatgcgctattatctagattcagtgttacattttcgatgtttatcactcagtgggtttttattaatatgctgattaagttatttactgggccagtcattgtgctaaatagttgctcttttgtgtttcattgccttgatgtttgagtgtaatctagcattttaatacagtgtttattttgcatgatctttaacaaatgttttaagcaattttaaaaaggcaggatgttattgacattatacactgaagtcttaacattttaacatttatagtgcttatttgcaaaattgtataattaggaattatttcagagacaatgttttctttttcaggtgagtagttgccgcgtaatatcattggagtacattctttatactgtttgtgaaattaatactagcatattaagtgtacaaatagatttagaaaacaataaaaaattgcatgctaaaaaaaaaaaaaaaaaaa

SEQ ID NO: 89 - protein, 1715 aa, Homo sapiens
MSVLISQSVINYVEEENIPALKALLEKCKDVDERNECGQTPLMIAAEQGNLEIVKELIKNGANCNLEDLDNWTALISASKEGHVHIVEELLKCGVNLEHRDMGGWTALMWACYKGRTDVVELLLSHGANPSVTGLQYSVYPIIWAAGRGHADIVHLLLQNGAKVNCSDKYGTTPLVWAARKGHLECVKHLLAMGADVDQEGANSMTALIVAVKGGYTQSVKEILKRNPNVNLTDKDGNTALMIASKEGHTEIVQDLLDAGTYVNIPDRSGDTVLIGAVRGGHVEIVRALLQKYADIDIRGQDNKTALYWAVEKGNATMVRDILQCNPDTEICTKDGETPLIKATKMRNIEVVELLLDKGAKVSAVDKKGDTPLHIAIRGRSRKLAELLLRNPKDGRLLYRPNKAGETPYNIDCSHQKSILTQIFGARHLSPTETDGDMLGYDLYSSALADILSEPTMQPPICVGLYAQWGSGKSFLLKKLEDEMKTFAGQQIEPLFQFSWLIVFLTLLLCGGLGLLFAFTVHPNLGIAVSLSFLALLYIFFIVIYFGGRREGESWNWAWVLSTRLARHIGYLELLLKLMFVNPPELPEQTTKALPVRFLFTDYNRLSSVGGETSLAEMIATLSDACEREFGFLATRLFRVFKTEDTQGKKKWKKTCCLPSFVIFLFIIGCIISGITLLAIFRVDPKHLTVNAVLISIASVVGLAFVLNCRTWWQVLDSLLNSQRKRLHNAASKLHKLKSEGFMKVLKCEVELMARMAKTIDSFTQNQTRLVVIIDGLDACEQDKVLQMLDTVRVLFSKGPFIAIFASDPHIIIKAINQNLNSVLRDSNINGHDYMRNIVHLPVFLNSRGLSNARKFLVTSATNGDVPCSDTTGIQEDADRRVSQNSLGEMTKLGSKTALNRRDTYRRRQMQRTITRQMSFDLTKLLVTEDWFSDISPQTMRRLLNIVSVTGRLLRANQISFNWDRLASWINLTEQWPYRTSWLILYLEETEGIPDQMTLKTIYERISKNIPTTKDVEPLLEIDGDIRNFEVFLSSRTPVLVARDVKVFLPCTVNLDPKLREIIADVRAAREQISIGGLAYPPLPLHEGPPRAPSGYSQPPSVCSSTSFNGPFAGGVVSPQPHSSYYSGMTGPQHPFYNRGSGPAPGPVVLLNSLNVDAVCEKLKQIEGLDQSMLPQYCTTIKKANINGRVLAQCNIDELKKEMNMNFGDWHLFRSTVLEMRNAESHVVPEDPRFLSESSSGPAPHGEPARRASHNELPHTELSSQTPYTLNFSFEELNTLGLDEGAPRHSNLSWQSQTRRTPSLSSLNSQDSSIEISKLTDKVQAEYRDAYREYIAQMSQLEGGPGSTTISGRSSPHSTYYMGQSSSGGSIHSNLEQEKGKDSEPKPDDGRKSFLMKRGDVIDYSSSGVSTNDASPLDPITEEDEKSDQSGSKLLPGKKSSERSSLFQTDLKLKGSGLRYQKLPSDEDESGTEESDNTPLLKDDKDRKAEGKVERVPKSPEHSAEPIRTFIKAKEYLSDALLDKKDSSDSGVRSSESSPNHSLHNEVADDSQLEKANLIELEDDSHSGKRGIPHSLSGLQDPIIARMSICSEDKKSPSECSLIASSPEENWPACQKAYNLNRTPSTVTLNNNSAPANRANQNFDEMEGIRETSQVILRPSSSPNPTTIQNENLKSMTHKRSQRSSYTRLSKDPPELHAAASSESTGFGEERESIL

SEQ ID NO: 90 - protein, 1184 aa, Homo sapiens
MSVLISQSVINYVEEENIPALKALLEKCKDVDERNECGQTPLMIAAEQGNLEIVKELIKNGANCNLEDLDNWTALISASKEGHVHIVEELLKCGVNLEHRDMGGWTALMWACYKGRTDVVELLLSHGANPSVTGLYSVYPIIWAAGRGHADIVHLLLQNGAKVNCSDKYGTTPLVWAARKGHLECVKHLLAMGADVDQEGANSMTALIVAVKGGYTQSVKEILKRNPNVNLTDKDGNTALMIASKEGHTEIVQDLLDAGTYVNIPDRSGDTVLIGAVRGGHVEIVRALLQKYADIDIRGQDNKTALYWAVEKGNATMVRDILQCNPDTEICTKDGETPLIKATKMRNIEVVELLLDKGAKVSAVDKKGDTPLHIAIRGRSRKLAELLLRNPKDGRLLYRPNKAGETPYNIDCSHQKSILTQIFGARHLSPTETDGDMLGYDLYSSALADILSEPTMQPPICVGLYAQWGSGKSFLLKKLEDEMKTFAGQQIEPLFQFSWLIVFLTLLLCGGLGLLFAFTVHPNLGIAVSLSFLALLYIFFIVIYFGGRREGESWNWAWVLSTRLARHIGYLELLLKLMFVNPPELPEQTTKALPVRFLFTDYNRLSSVGGETSLAEMIATLSDACEREFGFLATRLFRVFKTEDTQGKKKWKKTCCLPSFVIFLFIIGCIISGITLLAIFRVDPKHLTVNAVLISIASVVGLAFVLNCRTWWQVLDSLLNSQRKRLHNAASKLHKLKSEGFMKVLKCEVELMARMAKTIDSFTQNQTRLVVIIDGLDACEQDKVLQMLDTVRVLFSKGPFIAIFASDPHIIIKAINQNLNSVLRDSNINGHDYMRNIVHLPVFLNSRGLSNARKFLVTSATNGDVPCSDTTGIQEDADRRVSQNSLGEMTKLGSKTALNRRDTYRRRQMQRTITRQMSFDLTKLLVTEDWFSDISPQTMRRLLNIVSVTGRLLRANQISFNWDRLASWINLTEQWPYRTSWLILYLEETEGIPDQMTLKTIYERISKNIPTTKDVEPLLEIDGDIRNFEVFLSSRTPVLVARDVKVFLPCTVNLDPKLREIIADVRAAREQISIGGLAYPPLPLHEGPPRAPSGYSQPPSVCSSTSFNGPFAGGVVSPQPHSSYYSGMTGPQHPFYNRPFFAPYLYTPRYYPGGSQHLISRPSVKTSLPRDQNNGLVSYQGGCC

SEQ ID NO: 91 - protein, 1771 aa, Homo sapiens
MSVLISQSVINYVEEENIPALKALLEKCKDVDERNECGQTPLMIAAEQGNLEIVKELIKNGANCNLEDLDNWTALISASKEGHVHIVEELLKCGVNLEHRDMGGWTALMWACYKGRTDVVELLLSHGANPSVTGLYSVYPIIWAAGRGHADIVHLLLQNGAKVNCSDKYGTTPLVWAARKGHLECVKHLLAMGADVDQEGANSMTALIVAVKGGYTQSVKEILKRNPNVNLTDKDGNTALMIASKEGHTEIVQDLLDAGTYVNIPDRSGDTVLIGAVRGGHVEIVRALLQKYADIDIRGQDNKTALYWAVEKGNATMVRDILQCNPDTEICTKDGETPLIKATKMRNIEVVELLLDKGAKVSAVDKKGDTPLHIAIRGRSRKLAELLLRNPKDGRLLYRPNKAGETPYNIDCSHQKSILTQIFGARHLSPTETDGDMLGYDLYSSALADILSEPTMQPPICVGLYAQWGSGKSFLLKKLEDEMKTFAGQQIEPLFQFSWLIVFLTLLLCGGLGLLFAFTVHPNLGIAVSLSFLALLYIFFIVIYFGGRREGESWNWAWVLSTRLARHIGYLELLLKLMFVNPPELPEQTTKALPVRFLFTDYNRLSSVGGETSLAEMIATLSDACEREFGFLATRLFRVFKTEDTQGKKKWKKTCCLPSFVIFLFIIGCIISGITLLAIFRVDPKHLTVNAVLISIASVVGLAFVLNCRTWWQVLDSLLNSQRKRLHNAASKLHKLKSEGFMKVLKCEVELMARMAKTIDSFTQNQTRLVVIIDGLDACEQDKVLQMLDTVRVLFSKGPFIAIFASDPHIIIKAINQNLNSVLRDSNINGHDYMRNIVHLPVFLNSRGLSNARKFLVTSATNGDVPCSDTTGIQEDADRRVSQNSLGEMTKLGSKTALNRRDTYRRRQMQRTITRQMSFDLTKLLVTEDWFSDISPQTMRRLLNIVSVTGRLLRANQISFNWDRLASWINLTEQWPYRTSWLILYLEETEGIPDQMTLKTIYERISKNIPTTKDVEPLLEIDGDIRNFEVFLSSRTPVLVARDVKVFLPCTVNLDPKLREIIADVRAAREQISIGGLAYPPLPLHEGPPRAPSGYSQPPSVCSSTSFNGPFAGGVVSPQPHSSYYSGMTGPQHPFYNRPFFAPYLYTPRYYPGGSQHLISRPSVKTSLPRDQNNGLEVIKEDAAEGLSSPTDSSRGSGPAPGPVVLLNSLNVDAVCEKLKQIEGLDQSMLPQYCTTIKKANINGRVLAQCNIDELKKEMNMNFGDWHLFRSTVLEMRNAESHVVPEDPRFLSESSSGPAPHGEPARRASHNELPHTELSSQTPYTLNFSFEELNTLGLDEGAPRHSNLSWQSQTRRTPSLSSLNSQDSSIEISKLTDKVQAEYRDAYREYIAQMSQLEGGPGSTTISGRSSPHSTYYMGQSSSGGSIHSNLEQEKGKDSEPKPDDGRKSFLMKRGDVIDYSSSGVSTNDASPLDPITEEDEKSDQSGSKLLPGKKSSERSSLFQTDLKLKGSGLRYQKLPSDEDESGTEESDNTPLLKDDKDRKAEGKVERVPKSPEHSAEPIRTFIKAKEYLSDALLDKKDSSDSGVRSSESSPNHSLHNEVADDSQLEKANLIELEDDSHSGKRGIPHSLSGLQDPIIARMSICSEDKKSPSECSLIASSPEENWPACQKAYNLNRTPSTVTLNNNSAPANRANQNFDEMEGIRETSQVILRPSSSPNPTTIQNENLKSMTHKRSQRSSYTRLSKDPPELHAAASSESTGFGEERESIL

SEQ ID NO: 92 - protein, 6 aa, Homo sapiens
LQLSVK

SEQ ID NO: 93 - protein, 1715 aa, Rattus norvegicus
MSVLISQSVINYVEEENIPALKALLEKCKDVDERNECGQTPLMLAAEQGNVEIVKELLKNGANCNLEDLDNWTALISASKEGHIHIVEELLKSGASLEHRDMGGWTALMWACYKGRTDVVELLLSHGANPSVTGLQYSVYPIIWAAGRGHADIVHLLLQNGAKVNCSDKYGTTPLVWAARKGHLECVKHLLAMGADVDQEGANSMTALIVAVKGGYTQSVKEILKRNPNVNLTDKDGNTALMIASKEGHIEIVQDLLDAGTYVNIPDRSGDTVLIGAVRGGHVEIVRALLQKYADIDIRGQDNKTALYWAVEKGNATMVRDILQCNPDTEICTKDGETPLIKATKMRNIEVVELLLDKGAKVSAVDKKGDTPLHVAIRGRSRRLAELLLRNPKDGRLLYRPNKAGETPYNIDCSHQKSILTQIFGARHLSPTETDGDMLGYDLYSSALADILSEPTMQPPICVGLYAQWGSGKSFLLKKLEDEMKTFAGQQTEPLFQFSWLIVFLTLLLCGGLGLVFAFPVDTNLAIAISLSFLALIYIFFIVIYFGGRREGESWNWAWALSTRLARHIGYLELLFKLMFVNPPELPEQTTKALPVRFLFTDYNRLSSVGGETSLAEMIATLSDACEREFGFLATRLFRVFRTEESQGKKKWKKTCCLPSFVIFLFIVGCIIAGITLLAIFRVDPKHLTVNAILISIASVVGLAFVLNCRTWWQVLDSLLNSQRKRLHSAASKLHKLKSEGFMKVLKCEVELMARMAKTIDSFTQNQTRLVVIIDGLDACEQDKVLQMLDTVRVLFSKGPFIAIFASDPHIIIKAINQNLNSVLRDSNINGHDYMRNIVHLPVFLNSRGLSNARKFLVTSATNGDITCSDTTGTQEDTDRRVSQNSLGEMTKLGSKTALNRRDTYRRRQMQRTITRQMSFDLTKLLVTEDWFSDISPQTMRRLLNIVSVTGRLLRANQITFNWDRLASWINLTEQWPYRTSWLILYLEETEGLPDQMTLKTMYERISKNIPTTKDVEPLLEIDGDIRNFEVFLSSRTPVLVARDVKTFLPCTVNLDPKLREIIADVRAAREQINIGGLAYPPLPLHEGPPRPPSGYSQPASVCSSASFNGPFPGGVVSPQPHSSYYSGLSGPQHPFYNRAAVPATGSSLLLSSMTVDVVCEKLRQIEGLDQNMMPQYCTTIKKANINGRVLSQCNIDELKKEMAMNFGDWHLFRSMVLEMRSVESQVVPEDPRFLNENSSAPVPHGESARRSSHTELPLTELSSQTPYTLNFSFEELNTLGLDEGAPRHSNLSWQSQTRRTPSLSSLNSQDSSIEISKLTDKVQAEYRDAYREYIAQMSQLEGGTGSSTISGRSSPHSTYYIGQSSSGGSIHSTLEQERGKEGELKQEDGRKSFLMKRGDVIDYSSSGVSTNEASPLDPITEEDEKSDQSGSKLLPGKKSSERPSLFQTDLKLKGGGLRYQKLPSDEDESGTGRVQITPHCSKMIRTKRLKAKQRECASPQEHSAEPIRTFIKAKEYLSDALLDKKDSSDSGVRSNESSPNHSLHNEAADDSQLEKANLIELEDEGHSGKRGMPHSLSGLQDPIIARMSICSEDKKSPSECSLIASSPEESWPACQKAYNLNRTPSTVTLNNNTAPTNRANQNFDEIEGIRETSQVILRPGPSPNPTAVQNENLKSMAHKRSQRSSYTRLSKDASELHAASSESTGFGEERESIL

SEQ ID NO: 94 - protein, 1762 aa, Rattus norvegicus
MSVLISQSVINYVEEENIPALKALLEKCKDVDERNECGQTPLMLAAEQGNVEIVKELLKNGANCNLEDLDNWTALISASKEGHIHIVEELLKSGASLEHRDMGGWTALMWACYKGRTDVVELLLSHGANPSVTGLYSVYPIIWAAGRGHADIVHLLLQNGAKVNCSDKYGTTPLVWAARKGHLECVKHLLAMGADVDQEGANSMTALIVAVKGGYTQSVKEILKRNPNVNLTDKDGNTALMIASKEGHIEIVQDLLDAGTYVNIPDRSGDTVLIGAVRGGHVEIVRALLQKYADIDIRGQDNKTALYWAVEKGNATMVRDILQCNPDTEICTKDGETPLIKATKMRNIEVVELLLDKGAKVSAVDKKGDTPLHVAIRGRSRRLAELLLRNPKDGRLLYRPNKAGETPYNIDCSHQKSILTQIFGARHLSPTETDGDMLGYDLYSSALADILSEPTMQPPICVGLYAQWGSGKSFLLKKLEDEMKTFAGQQTEPLFQFSWLIVFLTLLLCGGLGLVFAFTVDTNLAIAISLSFLALIYIFFIVIYFGGRREGESWNWAWALSTRLARHIGYLELLFKLMFVNPPELPEQTTKALPVRFLFTDYNRLSSVGGETSLAEMIATLSDACEREFGFLATRLFRVFRTEESQGKKKWKKTCCLPSFVIFLFIVGCIIAGITLLAIFRVDPKHLTVNAILISIASVVGLAFVLNCRTWWQVLDSLLNSQRKRLHSAASKLHKLKSEGFMKVLKCEVELMARMAKTIDSFTQNQTRLVVIIDGLDACEQDKVLQMLDTVRVLFSKGPFIAIFASDPHIIIKAINQNLNSVLRDSNINGHDYMRNIVHLPVFLNSRGLSNARKFLVTSATNGDITCSDTTGTQEDTDRRVSQNSLGEMTKLGSKTALNRRDTYRRRQMQRTITRQMSFDLTKLLVTEDWFSDISPQTMRRLLNIVSVTGRLLRANQITFNWDRLASWINLTEQWPYRTSWLILYLEETEGLPDQMTLKTIYERISKNIPTTKDVEPLLEIDGDIRNFEVFLSSRTPVLVARDVKTFLPCTVNLDPKLREIIADVRAAREQINIGGLAYPPLPLHEGPPRPPSGYSQPASVCSSASFNGPFPGGVVSPQPHSSYYSGLSGPQHPFYNRPFFAPYLYTPRYYPGGSQHLISRSSVKTSLPRDQNNGLPCDSGFNKQRQAAVPATGSSLLLSSMTVDVVCEKLRQIEGLDQSMMPQYCTTIKKANINGRVLSQCNIDELKKEMAMNFGDWHLFRSMVLEMRSVESQVVPEDPRFLNENSSAPVPHGESARRSSHTELPLTELSSQTPYTLNFSFEELNTLGLDEGAPRHSNLSWQSQTRRTPSLSSLNSQDSSIEISKLTDKVQAEYRDAYREYIAQMSQLEGGTGSSTISGRSSPHSTYYIGQSSSGGSIHSTLEQERGKEGELKQEDGRKSFLMKRGDVIDYSSSGVSTNEASPLDPITEEDEKSDQSGSKLLPGKKSSERPSLFQTDLKLKGGGLRYQKLPSDEDESGTEESDNTPLLKDDKDKKAEGKAERVCKSPEHSAEPIRTFIKAKEYLSDALLDKKDSSDSGVRSNESSPNHSLHNEAADDSQLEKANLIELEDEGHSGKRGMPHSLSGLQDPIIARMSICSEDKKSPSECSLIASSPEESWPACQKAYNLNRTPSTVTLNNNTAPTNRANQNFDEIEGIRETSQVILRPGPSPNPTAVQNENLKSMAHKRSQRSSYTRLSKDASELHAASSESTGFGEERESIL

SEQ ID NO: 95 - DNA, 4372 bp, Homo sapiens
  CDS (78)..(1922)
cagtcctcgaccccccgcacctcgccccttccccaccccctcctccgcctcggtgcccggcgctgctccggaccactatgaccatgagatccgcggtgttcaaggcggccgcggcccctgccggcggcaatcctgagcagcgactggactacgagcgggctgcggcgctgggcgggcccgaggacgagcctggggcggccgaagcccacttcctcccccggcaccgtaagctcaaggagccggggcccccgctggcctcctcccagggcgggagccccgcgccttccccggccggctgcggcggcaagggccggggcttgttactcccggccggggcggcccccgggcagcaggaagagagctggggcggttcggtgcccttgccctgtccgcccccggccaccaagcaagccggcattgggggggagcctgccgcagccggagccggctgcagcccccggcccaagtatcaggcggtgctgcccattcagacgggctctctcgtggcggcggccaaagagcctacgccctgggctggggacaagggtggggcggcctcccccgctgccaccgcctcggacccggcgggacccccaccactacctctgcccgggccgccacccctcgcgcccaccgccaccgccgggaccctggcggccagcgagggcagatggaagagtatgaggaagagccctctcgggggtggtggcggctcgggagcctccagtcaggccgcctgcctcaaacagatccttctgctgcaattggacctcatcgaacagcagcagcagcagctgcaggccaaggaaaaggagatcgaggagctgaagtcagagagagacacgctccttgctcggattgaacgtatggaaaggcggatgcagctggtaaagaaggataacgagaaagaaaggcacaagctgtttcagggctatgaaactgaagagagagaggaaacagagctatctgagaaaattaaactggagtgccagccggagctttccgagacatcccagactctgcctcccaagcccttctcatgtgggcggagtggaaagggacataaaaggaaatccccatttggaagtacagaaagaaagactcctgttaaaaagctggctcctgaattttcaaaagtcaaaacaaaaactcctaagcactctcctattaaagaggaaccctgtggttccttatctgaaactgtttgtaaacgtgaattgaggagccaagaaaccccagaaaagccccggtcttcagtggacaccccaccaagactctccactccccaaaagggacccagcacccatcccaaggagaaagccttctcaagtgagatagaagatttgccgtacctttccaccacagaaatgtatttgtgtcgttggcaccagcctcccccatcaccgttaccattacgggaatcctctccaaagaaggaggagactgtagcaaggtgtctgatgccatcaagtgttgcaggagaaacttcagtcttggctgttccttcttggagggaccactcagtagagcctctaagggacccaaatccttcagaccttttggagaacctggatgacagtgtgttttcgaagcggcatgcaaaactggagctggatgagaagagaaggaaaagatgggatattcagaggatcagggaacaaagaattttacagcgactgcagctcagaatgtataaaaagaaaggaattcaggaatctgagcctgaggttacctcatttttccctgagccagatgatgttgaaagtttgatgattacccccttcttgcctgttgtagcatttggacgaccattaccaaaattaactccacagaattttgagctaccctggttggatgagcgtagccgatgcagattggagatccagaagaagcaaacacctcaccggacgtgtaggaaatagctgtgctggcaagaaccctgtcttcagatagttgtagcatgccattcccgagagtggcagagacctgtatatgtgacctttgtcctcacatatgttatcactcgctgataataccctttcatacttccttgactttgttttcattactctgatttcacaaaaactctttcattcggctaattgtgagttatggagggtgattgggatttcttttcccttttttgggaaatgggctctcaagctaaagctataggatggcagattcagaagtttcaggggtctgtttctatacatttgcctatgttaaaggggtaaaagggctctcttcattagacatgtggaagatgaagcagccccttcctttagagctgtgcctgcatggcactcttctcaccctggtacaccctccttatagtgggtatagtgatttttaaccctaaaataaaacaaacaacctcaccatgagctttaggaccagaagaggaatgacaagtgaagcgatgaagcaagccatcttcacagagtagaaaagacatcggagagttggtagataactgtctgaaaagatagttgttcatttgaaactattctgtgatacagtcatgtgggaagggatgtttggctgtgattattttttcagttaatggataacaatttctttactgctcaaaaaccaaaatctttggaaaagaaagtggggatggttagtttcagaacaagttacagctgtaaacaaaagcacttagtatttgggatggcatgccaaaacctgtataaatgtccttgtatcacatcacttctcaagtattccttcattgggcttcatccttttagcagaactcttggtggtgggatagagacttagggagggtagggggagagtgtggaaataggtgcttcctttggctggcaaatgtctacatcttgaaacaaacagatgtacctaatgagcttctccattcactttgtaaaaataatttgtatgtgtaccatcttggtcctctcccctcccgttttgttaaaatatcaggatagcactcccaggccactttggtctcagtgtaagatccctattaactatctgaaaggaaaatagagccaagacctctggtctcaaatatataggaattgcctttctttagtcttcaggactattgtgtgaaaacaagtaggggtctaatctcctagaaggtaggggcttttatccttaaagagaatatgtccccagattattagcacttttagaggagaagccaaggtatgtagggtgtgtggctggcccatcagtggagcacgaagagagaatgggataccattgtgggaagagaagaaaagttcctcaggggcctcccactgctaaagttttttgtgagatgttgatctgtgcttcctggatttgacttttaaaggaattattctggcagcacatgtagtattcttggatgatcttgctgctcttatttctccttttgtgtgtgtgtgtgtgtgtgtgtggctatgggttttcatttgtaactccatctgcttaggagagtgggctctctataagggaacctgctgtaaacttcattgcagcaaggatgtagagagaaataggacttaattccactaggggctctcatctcacaccttaaggaggagatttctagaaaaactgggccagattttctttgttctccatcattttaatgtggcaggctgttcagttttcttactcttacctatgtgatatttcttcgtaacgtgtccaaaaagaaaaaagacccaatcagtgtctcttgactttgttctttgatccctcagtttcttcttgatttcagcatgtgtcgggttcctaattttgggtatgagttagcaaatttaaccattgtgtttgtgccctacccaggggactccccagtttctgacttgaagtagactgagaagaatccacgaggtgctatctggccagatttaagtagattctatttccttggttctccctctccctgaggacctcttattttattgtcccctcttctaggttaattctcctttgatttgactttgttgagaaggaggttggacagtagattagcaaagttccaagtgcaaaattacagtgtgttagagtgtggggggaaaattagtcttatttttccctacatgggatacaacactgtgaattcaatcttcaactgaaggccctgcagttctcctaaaacatagttgtttgtttttctttaacaaagtttaagctagtgttaataaattaaaaaaaattgcttgtctgtctacttcagctttgttttatgcccatttcatattgttgtctgtgttgtaattcataacttttgataccatttctgatgtgtaaaattggttgtcttgtaaatatcttataaagagttcaattgtaaataaactattgtggctgttaaaaaaaaaaaaaaaaaaaaaaaaaaaaaaaa

SEQ ID NO: 96 - protein, 614 aa, Homo sapiens
MTMRSAVFKAAAAPAGGNPEQRLDYERAAALGGPEDEPGAAEAHFLPRHRKLKEPGPPLASSQGGSPAPSPAGCGGKGRGLLLPAGAAPGQQEESWGGSVPLPCPPPATKQAGIGGEPAAAGAGCSPRPKYQAVLPIQTGSLVAAAKEPTPWAGDKGGAASPAATASDPAGPPPLPLPGPPPLAPTATAGTLAASEGRWKSMRKSPLGGGGGSGASSQAACLKQILLLQLDLIEQQQQQLQAKEKEIEELKSERDTLLARIERMERRMQLVKKDNEKERHKLFQGYETEEREETELSEKIKLECQPELSETSQTLPPKPFSCGRSGKGHKRKSPFGSTERKTPVKKLAPEFSKVKTKTPKHSPIKEEPCGSLSETVCKRELRSQETPEKPRSSVDTPPRLSTPQKGPSTHPKEKAFSSEIEDLPYLSTTEMYLCRWHQPPPSPLPLRESSPKKEETVARCLMPSSVAGETSVLAVPSWRDHSVEPLRDPNPSDLLENLDDSVFSKRHAKLELDEKRRKRWDIQRIREQRILQRLQLRMYKKKGIQESEPEVTSFFPEPDDVESLMITPFLPVVAFGRPLPKLTPQNFELPWLDERSRCRLEIQKKQTPHRTCRK

SEQ ID NO: 97 - protein, 198 aa, Homo sapiens [sequence omitted]

SEQ ID NO: 98 - protein, 616 aa, Mus musculus
MTMRSAVFKAAAAPAGGNPEQRLDYERAAALGGPEDESGAAEAHFLPRHRKLKEPGPPLASSQGGSPSPSPAGCGGGKGRGLLLPAGAAPGQQEESWGGSVPLPCPPPATKQAGIGGEPVAAGAGCSPRPKYQAVLPIQTGSIVVAAAKEPTPWAGDKGGAAPPAATASDPAGPPPLPLPGPPPLAPTATAGTLAASEGRWKSIRKSPLGGGGGSGASSQAACLKQILLLQLDLIEQQQQQLQAKEKEIEELKSERDTLLARIERMERRMQLVKRDNEKERHKLLQGYEPEEREEAELSEKIKLERQPELCETSQALPSKPFSCGRSGKGHKRKTPFGNTERKNPVKKLAPEFSKVKTKTPKHSPIKEEPCGSISETVCKRELRSQETPEKPRSSVDTPPRLSTPQKGPSTHPKEKAFSSEMEDLPYLSTTEMYLCRWHQPPPSPLPLRESSPKKEETVARCLMPSSVAGETSVLAVPSWRDHSVEPLRDPNPSDILENLDDSVFSKRHAKLELDEKRRKRWDIQRIREQRILQRLQLRMYKKKGIQESEPEVTSFFPEPDDVESLLITPFLPVVAFGRPLPKLAPQNFELPWLDERSRCRLEIQKKHTPHRTCRK

SEQ ID NO: 99 - DNA, 2593 bp, Homo sapiens
  CDS (109)..(1572)
ctctctttcgctgtttgagagtctctcggctcaaggaccgggaggtaagaggtttgggactgccccggcaactccagggtgtctggtccacgacctatcctaggcgccatgggtgtgataggtatacagctggttgttaccatggtgatggccagtgtcatgcagaagattatacctcactattctcttgctcgatggctactctgtaatggcagtttgaggtggtatcaacatcctacagaagaagaattaagaattcttgcagggaaacaacaaaaagggaaaaccaaaaaagataggaaatataatggtcacattgaaagtaagccattaaccattccaaaggatattgaccttcatctagaaacaaagtcagttacagaagtggatactttagcattgcattactttccagaataccagtggctggtggatttcacagtggctgctacagttgtgtatctagtaactgaagtctactacaattttatgaagcctacacaggaaatgaatatcagcttagtctggtgcctacttgttttgtcttttgcaatcaaagttctattttcattaactacacactattttaaagtagaagatggtggtgaaagatctgtttgtgtcacctttggattttttttctttgtcaaagcaatggcagtgttgattgtaacagaaaattatctggaatttggacttgaaacagggtttacaaatttttcagacagtgcgatgcagtttcttgaaaagcaaggtttagaatctcagagtcctgtttcaaaacttactttcaaatttttcctggctattttctgttcattcattggggcttttttgacatttcctggattacgactggctcaaatgcatctggatgccctgaatttggcaacagaaaaaattacacaaactttacttcatatcaacttcttggcacctttatttatggttctgctctgggtaaaaccaatcaccaaagactacattatgaacccaccactgggcaaagaaagtatccctttaatgacagaagccacattcgatactctgcgactctggttaataatcctgctgtgtgctttgcggttggccatgatgcgtagtcacctgcaagcttatttaaatttagcccaaaaatgtgtggatcagatgaagaaagaagcggggcgaataagcacggttgagctacagaaaatggtggctcgagtcttttattatctttgtgtcattgcactgcagtatgtggcgcctctggtaatgctgcttcacacaactctgcttttgaaaacactaggtaatcattcctggggtatttatccagaatctatctctaccttaccagtggataatagtctactgtccaattctgtttactctgaattaccatcagctgaagggaaaatgaaggtaactgttacacaaataacagtggcactgagcagcttaaaaaatatttttactcctcttctttttcgaggacttctgtcttttctgacctggtggattgctgcttgcctcttttctacaagcctttttgggcttttctatcaccagtatctgactgtggcatgaatctcagttaacaaaaaagcatatccaaatcaccctttaaattaaaatatctgtgcccttaaagggctgatgaaaaccagaagaaagcaaatacaatgggaaaaaaaaaacatatcagaatgtcttgtattaaatgtttcctctgtattctcagggtgaattaatgtagtaatatttaaaattacaaaatagattgttaactgttacactgtggcattggaattttaactgtttgtatttactggtatgagagggctatctacaagggtaatatttctgattaccctggtttacagaaacctccagcagtctttgaaacatctcacatgactctagttattgattgcttttaatggttttatggtactgttgatagtcatagtggctgcctatagaacaatcttcaaactgagccatgctttaggggagggaaaggggctaaagtctcttctgttggtaatttattagttactcttgaaacaataaaatccaacagaaaggaagagatagctactgtatattacagtaaagaaagctgcatagttattttaaatttaatggagatgaatatggttaaaatatataactactgctgcttgagaatagcaagagtattgttttaaaacatattccacccaacttgagagttcttttaaaatgattggccatatgaacatttgtaatcttgccattaggtttggacctgccatattttgttttattctgtgatcctaactagttccttttaataggctaaaatatttatcaatactgatcagactttaaagaaattactttgtaaacctgctgactacctgtatgtattgtatatatattatatattaaatatataatatattgagattataaaagatgaaaatattgaatccttataatattttaagttgcagaatgtatgttaaaaagtgacttgaatgagatgtatttgtatctagaaattttatttctttttggaatgagattaaaatacattttgaaagttaaaaaaaaaaaaaaaaaa

SEQ ID NO: 100 - protein, 487 aa, Homo sapiens
MGVIGIQLVVTMVMASVMQKIIPHYSLARWLLCNGSLRWYQHPTEEELRILAGKQQKGKTKKDRKYNGHIESKPLTIPKDIDLHLETKSVTEVDTLALHYFPEYQWLVDFTVAATVVYLVTEVYYNFMKPTQEMNISLVWCLLVLSFAIKVLFSLTTHYFKVEDGGERSVCVTFGFFFFVKAMAVLIVTENYLEFGLETGFTNFSDSAMQFLEKQGLESQSPVSKLTFKFFLAIFCSFIGAFLTFPGLRLAQMHLDALNLATEKITQTLLHINFLAPLFMVLLWVKPITKDYIMNPPLGKESIPLMTEATFDTLRLWLIILLCALRLAMMRSHLQAYLNLAQKCVDQMKKEAGRISTVELQKMVARVFYYLCVIALQYVAPLVMLLHTTLLLKTLGNHSWGIYPESISTLPVDNSLLSNSVYSELPSAEGKMKVTVTQITVALSSLKNIFTPLLFRGLLSFLTWWIAACLFSTSLFGLFYHQYLTVA

SEQ ID NO: 101 - protein, 153 aa, Homo sapiens
MGVIGIQLVVTMVMASVMQKIIPHYSLARWLLCNGSLRWYQHPTEEELRILAGKQQKGKTKKDRKYNGHIESKPLTIPKDIDLHLETKSVTEVDTLALHYFPEYQWLVDFTVAATVVYLVTEVYYNFMKPTQEMNISLVWCLLVLSFAIRRWW

SEQ ID NO: 102 - protein, 360 aa, Macaca fascicular
MKPTQEMNISLVWCLLVLSFAIKVLFSLTTHYFKVEDGGERSVCVTFGFFFFVKAMAVLTVTENYLEFGLETGFTNFSDSAMQFLEKQGLESQSPVSKLTFKFFLAIFCSLIGAFLTFPGLRLAQMHLDALNLATEKITQTLLHINFLAPLFMVLLWVKPITKDYIMNPPLGKESIPLMTEATFDTLRLWLIILLCALRLAMMRSHLQAYLNLAQKCVDQMKKEAGRISTVELQKMVARVFYYLCVIALQYVAPLVMLLHTTLLLKTLGNHSWGIYPESISTLPADNSLLSNSVYSELPSAEGKMKVTVTQITVALSSLKNIFTPLLFRGLLSFLTWWIAACLFSTSLFGLFYHQYLTVA
